(19) United States
(12) Patent Application Publication
(10) Pub. No.: US 2005/0266397 A1
(43) Pub. Date: Dec. 1, 2005

(54) Methods for identification of coronaviruses

(76) Inventors: David J. Ecker, Encinitas, CA (US); Steven A. Hofstadler, Oceanside, CA (US); Rangarajan Sampath, San Diego, CA (US); Lawrence B. Blyn, Mission Viejo, CA (US); Thomas A. Hall, Oceanside, CA (US); Christian Massire, Carlsbad, CA (US)

Correspondence Address: Paul K. Legaard;COZEN O'CONNOR, 1900 Market Street, Philadelphia, PA, 19103, US

(21) Appl. No.: 10/829,826

(22) Filed: Apr. 22, 2004

Related U.S. Application Data
(60) Provisional application No. 60/466,009, filed on Apr. 26, 2003.
(60) Provisional application No. 60/467,768, filed on May 2, 2003.
(60) Provisional application No. 60/468,743, filed on May 7, 2003.
(60) Provisional application No. 60/542,510, filed on Feb. 6, 2004.

(51) Int. Cl. C12Q 1/70; C12Q 1/68

(52) U.S. Cl. 435/5; 435/6

(57) ABSTRACT

The present invention provides a method for rapid identification and quantitation of bacteria by amplification of a segment of bacterial nucleic acid followed by analysis by mass spectrometry. The compositions provide for characterization of the molecular masses and base compositions of bacterial nucleic acids which are used to rapidly identify bacteria.

### CROSS-REFERENCE TO RELATED APPLICATIONS

[0001] This application claims the benefit of priority to: 1) U.S. application Ser. No. 60/466,009 filed Apr. 26, 2003; 2) U.S. application Ser. No. 60/467,768 filed May 2, 2003; 3) U.S. application Ser. No. 60/468,743 filed May 7, 2003 and 4) U.S. application Ser. No. 60/542,510 filed Feb. 6, 2004, each of which is incorporated herein by reference in its entirety.

### REFERENCE TO SEQUENCE LISTING SUBMITTED ON COMPACT DISK

[0002] A Sequence Listing is located on a separate CD-R entitled “Copy 1” in a file entitled “IBIS0075-100.SEQ”, created Apr. 22, 2004, containing 2,445 kilobytes, and is incorporated herein by reference in its entirety. The total number of compact disks, including duplicates (“Copy 2”), submitted herewith is two, and there is one file on each of the submitted compact disks.

### FIELD OF THE INVENTION

[0003] The present invention relates generally to the field of genetic identification and quantitation of coronaviruses and provides methods, compositions and kits useful for this purpose when combined with molecular mass analysis.

### BACKGROUND OF THE INVENTION

[0004] Coronaviruses, a genus in the family Coronoviridae, are large, enveloped RNA viruses that cause highly prevalent diseases in humans and domestic animals. Coronavirus particles are irregularly-shaped, 60-220 nm in diameter, with an outer envelope bearing distinctive, “club-shaped” peplomers. This “crown-like” appearance gives the family its name. Coronaviruses have the largest genomes of all RNA viruses and replicate by a unique mechanism which results in a high frequency of recombination. Virions mature by budding at intracellular membranes and infection with some coronaviruses induces cell fusion.

[0005] Most human coronaviruses (HcoVs) do not grow in cultured cells, therefore relatively little is known about them, but two strains (229E and OC43) grow in some cell lines and have been used as a model. Replication is slow compared to other enveloped viruses. Viral entry occurs via endocytosis and membrane fusion (probably mediated by E2) and replication occurs in the cytoplasm.

[0006] Initially, the 5′ 20 kb of the (+)sense genome is translated to produce a viral polymerase, which is believed to produce a full-length (−)sense strand which, in turn, is used as a template to produce mRNA as a “nested set” of transcripts, all with an identical 5′ non-translated leader sequence of 72 nucleotides and coincident 3′ polyadenylated ends. Each mRNA is monocistronic, the genes at the 5′ end being translated from the longest mRNA. These unusual cytoplasmic structures are produced not by splicing (post-transcriptional modification) but by the polymerase during transcription.

[0007] Coronaviruses infect a variety of mammals and birds. The exact number of human isolates is not known as many cannot be grown in culture. In humans, they cause: respiratory infections (common), including Severe Acute Respiratory Syndrome (SARS), and enteric infections.

[0008] Coronaviruses are transmitted by aerosols of respiratory secretions, by the fecal-oral route, and by mechanical transmission. Most virus growth occurs in epithelial cells. Occasionally the liver, kidneys, heart or eyes may be infected, as well as other cell types such as macrophages. In cold-type respiratory infections, growth appears to be localized to the epithelium of the upper respiratory tract, but there is currently no adequate animal model for the human respiratory coronaviruses. Clinically, most infections cause a mild, self-limited disease (classical “cold” or upset stomach), but there may be rare neurological complications.

[0009] Coronavirus infection is very common and occurs worldwide. The incidence of infection is strongly seasonal, with the greatest incidence in children in winter. Adult infections are less common. The number of coronavirus serotypes and the extent of antigenic variation are unknown. Re-infections appear to occur throughout life, implying multiple serotypes (at least four are known) and/or antigenic variation, hence the prospects for immunization appear bleak.

[0010] SARS (Severe Acute Respiratory Syndrome) is a newly-recognized type of viral pneumonia, with symptoms including fever, a dry cough, dyspnea (shortness of breath), headache, and hypoxemia (low blood oxygen concentration). Typical laboratory findings include lymphopenia (reduced lymphocyte numbers) and mildly elevated aminotransferase levels (indicating liver damage). Death may result from progressive respiratory failure due to alveolar damage.

[0011] The outbreak is believed to have originated in February 2003 in the Guangdong province of China. After initial reports that a paramyxovirus was responsible, researchers now believe SARS to causually-linked with a type of novel coronavirus with some unusual properties. For example, the SARS virus can be grown in Vero cells (a primate fibroblast cell line)—a novel property for HCoVs, most of which cannot be cultivated. In these cells, virus infection results in a cytopathic effect, and budding of coronavirus-like particles from the endoplasmic reticulum within infected cells.

[0012] Amplification of short regions of the polymerase gene, (the most strongly conserved part of the coronavirus genome) by reverse transcriptase polymerase chain reaction (RT-PCR) and nucleotide sequencing revealed that the currently evaluated examples of the SARS virus are of a novel coronavirus which has not previously been present in human populations.

[0013] Different isolates of coronaviruses that have been causally linked to SARS have been independently sequenced by BCCA Genome Sciences Center, Vancouver, Canada; the Institute of Microbiology and Epidemiology, Academy of Military Medical Sciences/Beijing Genomics Institute, Chinese Academy of Sciences, Beijing, China; the Centers for Disease Control and Prevention (CDC), Atlanta; the Chinese University of Hong Kong; and the University of Hong Kong. As new SARS-linked coronavirus samples are obtained and sequenced, and as the initial SARS coronaviruses mutate, other coronavirus sequences causally-linked to SARS will emerge.

[0014] While the SARS epidemic is still at the early stages, Ruan et al have identified a number of variations in existing SARS CoV isolates that suggest the emergence of new genotypes (Y. Ruan et al., Lancet, May 9, (2003)). This phenomenon is likely to continue if SARS CoV passes through the human population and will have a detrimental impact on detection and treatment. Additional primers that flank regions of high variability could be valuable in epidemiological tracking of strain variants. Moreover, as loci important to virulence become identified, primers that flank these locations could provide valuable information.

[0015] Diagnostic tests are now available, but all have limitations as tools for bringing this outbreak quickly under control. An ELISA test detects antibodies reliably but only from about day 20 after the onset of clinical symptoms. It therefore cannot be used to detect cases at an early stage prior to spread of the infection to others. The second test, an immunofluorescence assay (IFA), detects antibodies reliably as of day 10 of infection. It shares the defect of the ELISA test in that test subjects have become infective prior to IFA-based diagnosis. Moreover, the IFA test is a demanding and comparatively slow test that requires the growth of virus in cell culture. The third test is a polymerase chain reaction (PCR) molecular test for detection of SARS virus genetic material is useful in the early stages of infection but undesirably produces false-negatives. Thus the PCR test may fail to detect persons who actually carry the virus, even in conjunction with clinical diagnostic evaluation, creating a dangerous sense of false security in the face of a potential epidemic of a virus that is known to spread easily in close person-to-person contact (WHO. Severe acute respiratory syndrome (SARS). Wkly Epidemiol. Rec. 2003, 78, 121-122).

[0016] Nucleic acid tests for infectious diseases are largely based upon amplifications using primers and probes designed to detect specific bioagents. Because prior knowledge of nucleic acid sequence information is required to develop these tests they are not able to identify unanticipated, newly emergent, or previously unknown infectious bioagents. Thus, the initial discovery of infectious bioagents still relies largely on culture and microscopy, which were as important in the recent identification of the SARS coronavirus as they were in the discovery of the human immunodeficiency virus two decades ago.

[0017] An alternative to single-agent tests is to do broad-range consensus priming of a gene target conserved across groups of bioagents. Broad-range priming has the potential to generate amplification products across entire genera, families, or, as with bacteria, an entire domain of life. This strategy has been successfully employed using consensus 16S ribosomal RNA primers for determining bacterial diversity, both in environmental samples (T. M. Schmidt, T. M., DeLong, E. F., Pace, N. R. J. Bact. 173, 4371-4378 (1991)) and in natural human flora (Kroes, I., Lepp, P. W., Relman, D. A. Proc Nat Acad Sci (USA) 96, 14547-14552 (1999)). The drawback of this approach for unknown bioagent detection and epidemiology is that analysis of the PCR products requires the cloning and sequencing of hundreds to thousands of colonies per sample, which is impractical to perform rapidly or on a large number of samples.

[0018] Consensus priming has also been described for detection of several viral families, including coronaviruses (Stephensen, C. B., Casebolt, D. B. Gangopadhyay, N. N. Vir. Res. 60, 181-189 (1999)), enteroviruses (M. S. Oberste, K. Maher, M. A. Pallansch, J. Virol. 76, 1244-51 (2002); M. S. Oberste, W. A. Nix, K. Maher, M. A. Pallansch, J. Clin. Virol. 26, 375-7 (2003); M. S. Oberste, W. A. Nix, D. R. Kilpatrick, M. R. Flemister, M. A. Pallansch, Virus Res. 91, 241-8(2003)), retroid viruses (D. H. Mack, J. J. Sninsky, Proc. Natl. Acad. Sci. U.S.A. 85, 6977-81 (1988); W. Seifarth et al., AIDS Res. Hum. Retroviruses 16, 721-729 (2000); L. A. Donehower, R. C. Bohannon, R. J. Ford, R. A. Gibbs, J. Vir. Methods 28, 33-46 (1990)), and adenoviruses (M. Echavarria, M. Forman, J. Ticehurst, S. Dumler, P. Charache, J. Clin. Micro. 36, 3323-3326 (1998)). However, as with bacteria, there is no adequate analytical method other than sequencing to identify the viral bioagent present.

[0019] Methods of identification of bioagents are described in U.S. patent application Ser. No. 09/798,007, filed Mar. 3, 2001; Ser. No. 10/405,756, filed Mar. 31, 2003; Ser. No. 10/660,122, filed Sep. 11, 2003; and Ser. No. 10/728,486, filed Dec. 5, 2003, all of which are commonly owned and incorporated herein by reference in entirety as essential material.

[0020] Mass spectrometry provides detailed information about the molecules being analyzed, including high mass accuracy. It is also a process that can be easily automated. However, high-resolution MS alone fails to perform against unknown or bioengineered agents, or in environments where there is a high background level of bioagents (“cluttered” background). Low-resolution MS can fail to detect some known agents, if their spectral lines are sufficiently weak or sufficiently close to those from other living organisms in the sample. DNA chips with specific probes can only determine the presence or absence of specifically anticipated organisms. Because there are hundreds of thousands of species of benign bacteria, some very similar in sequence to threat organisms, even arrays with 10,000 probes lack the breadth needed to detect a particular organism.

[0021] Antibodies face more severe diversity limitations than arrays. If antibodies are designed against highly conserved targets to increase diversity, the false alarm problem will dominate, again because threat organisms are very similar to benign ones. Antibodies are only capable of detecting known agents in relatively uncluttered environments.

[0022] Several groups have described detection of PCR products using high resolution electrospray ionization—Fourier transform—ion cyclotron resonance mass spectrometry (ESI-FT-ICR MS). Accurate measurement of exact mass combined with knowledge of the number of at least one nucleotide allowed calculation of the total base composition for PCR duplex products of approximately 100 base pairs. (Aaserud et al., J. Am. Soc. Mass Spec. 7:1266-1269, 1996; Muddiman et al., Anal. Chem. 69:1543-1549, 1997; Wunschel et al., Anal. Chem. 70:1203-1207, 1998; Muddiman et al., Rev. Anal. Chem. 17:1-68, 1998). Electrospray ionization-Fourier transform-ion cyclotron resistance (ESI-FT-ICR) MS may be used to determine the mass of double-stranded, 500 base-pair PCR products via the average molecular mass (Hurst et al., Rapid Commun. Mass Spec. 10:377-382, 1996). The use of matrix-assisted laser desorption ionization-time of flight (MALDI-TOF) mass spectrometry for characterization of PCR products has been described. (Muddiman et al., Rapid Commun. Mass Spec. 13:1201-1204, 1999). However, the degradation of DNAs over about 75 nucleotides observed with MALDI limited the utility of this method.

[0023] U.S. Pat. No. 5,849,492 describes a method for retrieval of phylogenetically informative DNA sequences which comprise searching for a highly divergent segment of genomic DNA surrounded by two highly conserved segments, designing the universal primers for PCR amplification of the highly divergent region, amplifying the genomic DNA by PCR technique using universal primers, and then sequencing the gene to determine the identity of the organism.

[0024] U.S. Pat. No. 5,965,363 discloses methods for screening nucleic acids for polymorphisms by analyzing amplified target nucleic acids using mass spectrometric techniques and to procedures for improving mass resolution and mass accuracy of these methods.

[0025] WO 99/14375 describes methods, PCR primers and kits for use in analyzing preselected DNA tandem nucleotide repeat alleles by mass spectrometry.

[0026] WO 98/12355 discloses methods of determining the mass of a target nucleic acid by mass spectrometric analysis, by cleaving the target nucleic acid to reduce its length, making the target single-stranded and using MS to determine the mass of the single-stranded shortened target. Also disclosed are methods of preparing a double-stranded target nucleic acid for MS analysis comprising amplification of the target nucleic acid, binding one of the strands to a solid support, releasing the second strand and then releasing the first strand which is then analyzed by MS. Kits for target nucleic acid preparation are also provided.

[0027] PCT WO97/33000 discloses methods for detecting mutations in a target nucleic acid by nonrandomly fragmenting the target into a set of single-stranded nonrandom length fragments and determining their masses by MS.

[0028] U.S. Pat. No. 5,605,798 describes a fast and highly accurate mass spectrometer-based process for detecting the presence of a particular nucleic acid in a biological sample for diagnostic purposes.

[0029] WO 98/21066 describes processes for determining the sequence of a particular target nucleic acid by mass spectrometry. Processes for detecting a target nucleic acid present in a biological sample by PCR amplification and mass spectrometry detection are disclosed, as are methods for detecting a target nucleic acid in a sample by amplifying the target with primers that contain restriction sites and tags, extending and cleaving the amplified nucleic acid, and detecting the presence of extended product, wherein the presence of a DNA fragment of a mass different from wild-type is indicative of a mutation. Methods of sequencing a nucleic acid via mass spectrometry methods are also described.

[0030] WO 97/37041, WO 99/31278 and U.S. Pat. No. 5,547,835 describe methods of sequencing nucleic acids using mass spectrometry. U.S. Pat. Nos. 5,622,824, 5,872,003 and 5,691,141 describe methods, systems and kits for exonuclease-mediated mass spectrometric sequencing.

[0031] The present invention provides a novel approach for rapid, sensitive, and high-throughput identification of coronaviruses and includes the capability of identification of coronaviruses not yet observed and characterized. The methods described can be applied to additional viral families to cover a broad range of potential newly emerging viruses, or to bacterial, protozoal or fungal pathogens for epidemic disease surveillance in the future.

### SUMMARY OF THE INVENTION

[0032] The present invention is directed to, inter alia, methods of identification of one or more unknown coronaviruses in a sample by obtaining coronavirus RNA from the sample, obtaining corresponding DNA from the RNA, amplifying the DNA with one or more pairs of oligonucleotide primers that bind to conserved regions of a coronavirus genome which are flanked a variable region of the coronavirus genome, determining the molecular masses or base compositions of the one or more amplification products and comparing the molecular masses or base compositions with calculated or experimentally determined molecular masses or base compositions, wherein one or more matches identifies the unknown coronavirus.

[0033] The present invention is also directed to methods of tracking the spread of a specific coronavirus comprising: obtaining a plurality of samples containing a specific coronavirus from a plurality of different locations, identifying the specific coronavirus in a subset of the plurality of samples using the method described in the paragraph above, wherein the corresponding locations of the members of the subset indicate the spread of the specific coronavirus to the corresponding locations.

[0034] The present invention is also directed to pairs of primers wherein each member of each pair has at least 70% sequence identity with the sequence of the corresponding member of any one of the following intelligent primer pair sequences: SEQ ID NOs: 5:6, 7:8, 9:8, 9:10, 11:8, 11:10 or 9:10. The present invention is also directed to individual primers within each of the primer pairs described herein.

[0035] The present invention is also directed to bioagent identifying amplicons for identification of a coronavirus comprising an isolated polynucleotide of about 45 to about 150 nucleobases in length produced by the process of amplification of nucleic acid from a coronavirus genome with a primer pair wherein each primer of the pair is of a length of about 12 to about 35 nucleobases and the bioagent identifying amplicon provides identifying information about the coronavirus.

[0036] The present invention is also directed to methods for simultaneous determination of the identity and quantity of an unknown coronavirus in a sample comprising: contacting a sample with a pair of primers and a known quantity of a calibration polynucleotide comprising a calibration sequence, simultaneously amplifying nucleic acid from the unknown coronavirus with the pair of primers and amplifying nucleic acid from the calibration polynucleotide in the sample with the pair of primers to obtain a first amplification product comprising a bioagent identifying amplicon and a second amplification product comprising a calibration amplicon, subjecting the sample to molecular mass analysis wherein the result of the mass analysis comprises molecular mass and abundance data for the bioagent identifying amplicon and the calibration amplicon, and distinguishing the bioagent identifying amplicon from the calibration amplicon based on molecular mass wherein the molecular mass of the bioagent identifying amplicon identifies the coronavirus and comparison of bioagent identifying amplicon abundance data and calibration amplicon abundance data indicates the quantity of coronavirus in the sample.

[0037] The present invention is also directed to isolated polynucleotides for determining the quantity of a bioagent in a sample comprising SEQ ID NOs: 102, and 103 as well as vectors comprising of SEQ ID NOs: 102, 103 and 104.

[0038] The present invention is also directed to kits comprising one or more pairs of primers, or individual primers, wherein each member of each pair has at least 70% sequence identity with the sequence of the corresponding member of any one of the following intelligent primer pair sequences: SEQ ID NOs: 5:6, 7:8, 9:8, 9:10, 11:8, 11:10 or 9:10.

### BRIEF DESCRIPTION OF THE DRAWINGS

[0039] FIGS. 1A-1H and FIG. 2 are consensus diagrams that show examples of conserved regions of 16S rRNA (FIGS. 1A, 1A-2, 1A-3, 1A-4 and 1A-5), 23S rRNA (3′-half, FIGS. 1B-1, 1B-2, 1C-1, 1C-2, and 1D; 5′-half, FIG. 1E-F), 23S rRNA Domain I (FIG. 1G), 23S rRNA Domain IV (FIG. 1H) and 16S rRNA Domain III (FIG. 2). DNA segments encoding these regions are suitable for use as templates for generation of bioagent identifying amplicons. Lines with arrows are examples of regions (in corresponding DNA) to which intelligent primer pairs for PCR are designed. The label for each primer pair represents the starting and ending base number of the amplified region on the consensus diagram. Bases in capital letters are greater than 95% conserved; bases in lower case letters are 90-95% conserved, filled circles are 80-90% conserved; and open circles are less than 80% conserved. The label for each primer pair represents the starting and ending base number of the amplified region on the consensus diagram. The nucleotide sequence of the 16S rRNA consensus sequence is SEQ ID NO:3 and the nucleotide sequence of the 23S rRNA consensus sequence is SEQ ID NO:4.

[0040] FIG. 2 shows a typical primer amplified region from the 16S rRNA Domain III shown in FIG. 1A-1.

[0041] FIG. 3 is a schematic diagram showing conserved regions in RNase P. Bases in capital letters are greater than 90% conserved; bases in lower case letters are 80-90% conserved; filled circles designate bases which are 70-80% conserved; and open circles designate bases that are less than 70% conserved.

[0042] FIG. 4 is a schematic diagram of base composition signature determination using nucleotide analog “tags” to determine base composition signatures.

[0043] FIG. 5 shows the deconvoluted mass spectra of a Bacillus anthracis region with and without the mass tag phosphorothioate A (A*). The two spectra differ in that the measured molecular weight of the mass tag-containing sequence is greater than the unmodified sequence.

[0044] FIG. 6 is a process diagram illustrating the primer selection process. For each group of organisms, candidate target sequences are identified (200) from which nucleotide alignments are created (210) and analyzed (220). Primers are then designed by selecting appropriate priming regions (230) which then makes possible the selection of candidate primer pairs (240). The primer pairs are then subjected to in silico analysis by electronic PCR (ePCR) (300) wherein bioagent identifying amplicons are obtained from sequence databases such as GenBank or other sequence collections (310) and checked for specificity in silico (320). Bioagent identifying amplicons obtained from GenBank sequences (310) can also be analyzed by a probability model which predicts the capability of a given amplicon to identify unknown bioagents such that the base compositions of amplicons with favorable probability scores are then stored in a base composition database (325). Alternatively, base compositions of the bioagent identifying amplicons obtained from the primers and GenBank sequences can be directly entered into the base composition database (330). Candidate primer pairs (240) are validated by in vitro amplification by a method such as PCR analysis (400) of nucleic acid from a collection of organisms (410). Amplification products thus obtained are analyzed to confirm the sensitivity, specificity and reproducibility of the primers used to obtain the amplification products (420).

[0045] FIG. 7 indicates two coronavirus genomic regions used to generate bioagent identifying amplicons for coronaviruses. The two primer pair regions are mapped onto the SARS CoV (TOR2, NC_{—}004718.3: SEQ ID NO: 85) genome coordinates. The RdRp amplicon corresponds to positions 15,132-15,218 and the nsp11 amplicon corresponds to positions 19,098-19,234 of the same sequence. Multiple sequence alignments of additional available coronavirus sequences corresponding to these two amplified regions are shown. Coronavirus isolates that were sequenced as part of this work are shown with an asterisk. All other sequences were obtained from GenBank. nsp11 sequences for PHEV and TCoV are not available and are shown with a dashed line. Forward and reverse primer regions are highlighted. 5′ ends of all primers were designed with a thymidine (T) nucleotide which acts to minimize the addition of non-templated A residues during PCR. For each specific coronavirus, the positions that are mismatched compared to the primer sequence are shown. The complement of the actual primer is shown for the reverse primers. The region between the forward and reverse primers for each virus varies among different coronaviruses (not shown) and provides the signature for resolving them by molecular mass or base composition. Primer positions chemically modified with propyne groups are highlighted. The structures of 5-propynyldeoxycytidine and 5-propynyldeoxyurididine nucleotides used in primers are shown.

[0046] FIG. 8 is an ESI-FTICR mass spectrum measurement of the PCR amplicon from the SARS coronavirus obtained using the propynylated RdRp primer pairs. The electrospray ionization conditions separate the sense and antisense strands of the PCR products (500). Multiple charge states are observed across the m/z range shown (510) from which is obtained an expanded view of the isotope envelope of the (M−27H+)27− species (520). The derived molecular masses (530) for the sense amplicon strand is 27298.518 from which is calculated (540) the unambiguous base composition of A₂₇G₁₉C₁₄T₂₈ for the sense strand (seen also in Table 4). This base composition corresponds to the base composition calculated based on the bioagent identifying amplicon of the genomic sequence of the SARS coronavirus.

[0047] FIG. 9 shows a series of mass spectra which was used to identify three human coronaviruses in a mixture. The deconvoluted (neutral mass) mass spectra obtained for the RdRp primer for the three human coronaviruses, HCoV-229E, HCoV-OC43 and SARS CoV, that were tested individually and in a mixture are shown. Forward and reverse amplicons are shown with the measured monoisotopic masses for each strand.

[0048] FIG. 10 indicates three dimensional plots of experimentally determined base compositions (solid cones) and calculated base compositions (spheres) for bioagent identifying amplicons of coronaviruses obtained with a RdRp primer set and a nsp11 primer set. The position of the base composition indicates the intersection of A, C and T content in each base composition, with G content illustrated in a “pseudo-fourth” dimension indicated by the angle of rotation of the cone. For the RdRp primer set, the experimentally-determined base compositions were in agreement with the calculated base compositions except for the canine coronavirus isolate (CcoV) which was found to have a composition that differed from that calculated based on available sequence information by a single T to C substitution (indicated by a dashed line).

[0049] FIG. 11 shows a mass spectrum containing mass peaks corresponding to the PCR internal standard calibrant amplicon at a dilution corresponding to a nucleic acid copy number of 3×10⁴ and a SARS coronavirus bioagent identifying amplicon. The comparison of peak abundances of the two peaks enabled the determination that 1 PFU of SARS coronavirus=300 copies of nucleic acid.

### DESCRIPTION OF EMBODIMENTS

A. Introduction

[0050] The present invention provides methods for detection and identification of bioagents in an unbiased manner using “bioagent identifying amplicons.” “Intelligent primers” are selected to hybridize to conserved sequence regions of nucleic acids derived from a bioagent and which bracket variable sequence regions to yield a bioagent identifying amplicon which can be amplified and which is amenable to molecular mass determination. The molecular mass then provides a means to uniquely identify the bioagent without a requirement for prior knowledge of the possible identity of the bioagent. The molecular mass or corresponding “base composition signature” (BCS) of the amplification product is then matched against a database of molecular masses or base composition signatures. Furthermore, the method can be applied to rapid parallel “multiplex” analyses, the results of which can be employed in a triangulation identification strategy. The present method provides rapid throughput and does not require nucleic acid sequencing of the amplified target sequence for bioagent detection and identification.

B. Bioagents

[0051] In the context of this invention, a “bioagent” is any organism, cell, or virus, living or dead, or a nucleic acid derived from such an organism, cell or virus. Examples of bioagents include, but are not limited, to cells, including but not limited to human clinical samples, bacterial cells and other pathogens), viruses, fungi, protists, parasites, and pathogenicity markers (including but not limited to: pathogenicity islands, antibiotic resistance genes, virulence factors, toxin genes and other bioregulating compounds). Samples may be alive or dead or in a vegetative state (for example, vegetative bacteria or spores) and may be encapsulated or bioengineered. In the context of this invention, a “pathogen” is a bioagent which causes a disease or disorder.

[0052] Despite enormous biological diversity, all forms of life on earth share sets of essential, common features in their genomes. Bacteria, for example have highly conserved sequences in a variety of locations on their genomes. Most notable is the universally conserved region of the ribosome. There are also conserved elements in other non-coding RNAs, including RNAse P (FIG. 3) and the signal recognition particle (SRP) among others. Bacteria have a common set of absolutely required genes. About 250 genes are present in all bacterial species (Proc. Natl. Acad. Sci. U.S.A., 1996, 93, 10268; Science, 1995, 270, 397), including tiny genomes like Mycoplasma, Ureaplasma and Rickettsia. These genes encode proteins involved in translation, replication, recombination and repair, transcription, nucleotide metabolism, amino acid metabolism, lipid metabolism, energy generation, uptake, secretion and the like. Examples of these proteins are DNA polymerase III beta, elongation factor TU, heat shock protein groEL, RNA polymerase beta, phosphoglycerate kinase, NADH dehydrogenase, DNA ligase, DNA topoisomerase and elongation factor G. Operons can also be targeted using the present method. One example of an operon is the bfp operon from enteropathogenic E. coli. Multiple core chromosomal genes can be used to classify bacteria at a genus or genus species level to determine if an organism has threat potential. The methods can also be used to detect pathogenicity markers (plasmid or chromosomal) and antibiotic resistance genes to confirm the threat potential of an organism and to direct countermeasures.

C. Selection of “Bioagent Identifying Amplicons”

[0053] Since genetic data provide the underlying basis for identification of bioagents by the methods of the present invention, it is necessary to select segments of nucleic acids which ideally provide enough variability to distinguish each individual bioagent and whose molecular mass is amenable to molecular mass determination. In one embodiment of the present invention, at least one polynucleotide segment is amplified to facilitate detection and analysis in the process of identifying the bioagent. Thus, the nucleic acid segments which provide enough variability to distinguish each individual bioagent and whose molecular masses are amenable to molecular mass determination are herein described as “bioagent identifying amplicons.” The term “amplicon” as used herein, refers to a segment of a polynucleotide which is amplified in an amplification reaction.

[0054] In one embodiment, bioagent identifying amplicons are from about 45 nucleobases to about 150 nucleobases in length.

[0055] Pre-bioagent identifying amplicons are amplicons which may greatly exceed about 45 to about 150 nucleobases in length and which contain sites for cleavage (by restriction endonucleases, for example) to yield bioagent identifying amplicons which are fragments of a given pre-bioagent identifying amplicon and which are amenable to molecular mass analysis.

[0056] As used herein, “intelligent primers” are primers that are designed to bind to highly conserved sequence regions of a bioagent identifying amplicon that flank an intervening variable region and yield amplification products which ideally provide enough variability to distinguish each individual bioagent, and which are amenable to molecular mass analysis. By the term “highly conserved,” it is meant that the sequence regions exhibit between about 80-100%, or between about 90-100%, or between about 95-100% identity. The molecular mass of a given amplification product provides a means of identifying the bioagent from which it was obtained, due to the variability of the variable region. Thus design of intelligent primers requires selection of a variable region with appropriate variability to resolve the identity of a given bioagent. Bioagent identifying amplicons are ideally specific to the identity of the bioagent. A plurality of bioagent identifying amplicons selected in parallel for distinct bioagents which contain the same conserved sequences for hybridization of the same pair of intelligent primers are herein defined as “correlative bioagent identifying amplicons.”

[0057] In one embodiment, the bioagent identifying amplicon is a portion of a ribosomal RNA (rRNA) gene sequence. With the complete sequences of many of the smallest microbial genomes now available, it is possible to identify a set of genes that defines “minimal life” and identify composition signatures that uniquely identify each gene and organism. Genes that encode core life functions such as DNA replication, transcription, ribosome structure, translation, and transport are distributed broadly in the bacterial genome and are suitable regions for selection of bioagent identifying amplicons. Ribosomal RNA (rRNA) genes comprise regions that provide useful base composition signatures. Like many genes involved in core life functions, rRNA genes contain sequences that are extraordinarily conserved across bacterial domains interspersed with regions of high variability that are more specific to each species. The variable regions can be utilized to build a database of base composition signatures. The strategy involves creating a structure-based alignment of sequences of the small (16S) and the large (23S) subunits of the rRNA genes. For example, there are currently over 13,000 sequences in the ribosomal RNA database that has been created and maintained by Robin Gutell, University of Texas at Austin, and is publicly available on the Institute for Cellular and Molecular Biology web page on the world wide web of the Internet at, for example, “rna.icmb.utexas.edu/.” There is also a publicly available rRNA database created and maintained by the University of Antwerp, Belgium on the world wide web of the Internet at, for example, “rrna.uia.ac.be.”

[0058] These databases have been analyzed to determine regions that are useful as bioagent identifying amplicons. The characteristics of such regions include: a) between about 80 and 100%, or greater than about 95% identity among species of the particular bioagent of interest, of upstream and downstream nucleotide sequences which serve as sequence amplification primer sites; b) an intervening variable region which exhibits no greater than about 5% identity among species; and c) a separation of between about 30 and 1000 nucleotides, or no more than about 50-250 nucleotides, or no more than about 60-100 nucleotides, between the conserved regions.

[0059] As a non-limiting example, for identification of Bacillus species, the conserved sequence regions of the chosen bioagent identifying amplicon must be highly conserved among all Bacillus species while the variable region of the bioagent identifying amplicon is sufficiently variable such that the molecular masses of the amplification products of all species of Bacillus are distinguishable.

[0060] Bioagent identifying amplicons amenable to molecular mass determination are either of a length, size or mass compatible with the particular mode of molecular mass determination or compatible with a means of providing a predictable fragmentation pattern in order to obtain predictable fragments of a length compatible with the particular mode of molecular mass determination. Such means of providing a predictable fragmentation pattern of an amplification product include, but are not limited to, cleavage with restriction enzymes or cleavage primers, for example.

[0061] Identification of bioagents can be accomplished at different levels using intelligent primers suited to resolution of each individual level of identification. “Broad range survey” intelligent primers are designed with the objective of identifying a bioagent as a member of a particular division of bioagents. A “bioagent division” is defined as group of bioagents above the species level and includes but is not limited to: orders, families, classes, clades, genera or other such groupings of bioagents above the species level. As a non-limiting example, members of the Bacillus/Clostridia group or gamma-proteobacteria group may be identified as such by employing broad range survey intelligent primers such as primers which target 16S or 23S ribosomal RNA.

[0062] In some embodiments, broad range survey intelligent primers are capable of identification of bioagents at the species level. One main advantage of the detection methods of the present invention is that the broad range survey intelligent primers need not be specific for a particular bacterial species, or even genus, such as Bacillus or Streptomyces. Instead, the primers recognize highly conserved regions across hundreds of bacterial species including, but not limited to, the species described herein. Thus, the same broad range survey intelligent primer pair can be used to identify any desired bacterium because it will bind to the conserved regions that flank a variable region specific to a single species, or common to several bacterial species, allowing unbiased nucleic acid amplification of the intervening sequence and determination of its molecular weight and base composition. For example, the 16S_{—}971-1062, 16S_{—}1228-1310 and 16S_{—}1100-1188 regions are 98-99% conserved in about 900 species of bacteria (16S=16S rRNA, numbers indicate nucleotide position). In one embodiment of the present invention, primers used in the present method bind to one or more of these regions or portions thereof.

[0063] Due to their overall conservation, the flanking rRNA primer sequences serve as good intelligent primer binding sites to amplify the nucleic acid region of interest for most, if not all, bacterial species. The intervening region between the sets of primers varies in length and/or composition, and thus provides a unique base composition signature. Examples of intelligent primers that amplify regions of the 16S and 23S rRNA are shown in FIGS. 1A-1H. A typical primer amplified region in 16S rRNA is shown in FIG. 2. The arrows represent primers that bind to highly conserved regions of the DNA encoding these regions, which flank a variable region in 16S rRNA domain III. The amplified region corresponds to the stem-loop structure under “1100-1188.” It is advantageous to design the broad range survey intelligent primers to minimize the number of primers required for the analysis, and to allow detection of multiple members of a bioagent division using a single pair of primers. The advantage of using broad range survey intelligent primers is that once a bioagent is broadly identified, the process of further identification at species and sub-species levels is facilitated by directing the choice of additional intelligent primers.

[0064] “Division-wide” intelligent primers are designed with an objective of identifying a bioagent at the species level. As a non-limiting example, a Bacillus anthracis, Bacillus cereus and Bacillus thuringiensis can be distinguished from each other using division-wide intelligent primers. Division-wide intelligent primers are not always required for identification at the species level because broad range survey intelligent primers may provide sufficient identification resolution to accomplishing this identification objective.

[0065] “Drill-down” intelligent primers are designed with an objective of identifying a sub-species characteristic of a bioagent. A “sub-species characteristic” is defined as a property imparted to a bioagent at the sub-species level of identification as a result of the presence or absence of a particular segment of nucleic acid. Such sub-species characteristics include, but are not limited to, strains, sub-types, pathogenicity markers such as antibiotic resistance genes, pathogenicity islands, toxin genes and virulence factors. Identification of such sub-species characteristics is often critical for determining proper clinical treatment of pathogen infections.

D. Selection and Optimization of Intelligent Primers

[0066] A representative process flow diagram used for primer selection and validation process is outlined in FIG. 6. Many of the important pathogens, including the organisms of greatest concern as biological weapons agents, have been completely sequenced. This effort has greatly facilitated the design of primers and probes for the detection of bacteria. Partial or full-length sequences from over 225 bacterial genomes have been obtained and sequence alignments have been generated for essential genes that are conserved either broadly across all organisms or within members of specific, related phylogenetic groups. In bacteria, for instance, alignments have been generated from over 170 housekeeping genes that are present in almost all major bacterial divisions. These genes have been used for identification of broad diagnostic primers. PCR primer selection and optimization has been largely automated. A number of genes, in addition to 16S rRNA, are targets of “broad-range” primers, thus increasing the redundancy of detection and classification, while minimizing potential missed identifications. Many of these genes are, expectedly, essential to information processing, with more than half being associated with the translational machinery, such as elongation factors, ribosomal proteins and tRNA synthetases. Other classes of conserved protein-encoding genes include transcription-associated genes such as RNA polymerases and genes associated with DNA replication such as DNA gyrase and DNA polymerase. This combination of broad-range priming with clade- and species-specific priming has been used very successfully in several applications of the technology, including environmental surveillance for biowarfare threat agents and clinical sample analysis for medically important pathogens.

[0067] Ideally, intelligent primer hybridization sites are highly conserved in order to facilitate the hybridization of the primer. In cases where primer hybridization is less efficient due to lower levels of conservation of sequence, intelligent primers can be chemically modified to improve the efficiency of hybridization.

[0068] In some embodiments of the present invention, intelligent primers may contain one or more universal bases. Because any variation (due to codon wobble in the 3^{rd} position) in the conserved regions among species is likely to occur in the third position of a DNA triplet, oligonucleotide primers can be designed such that the nucleotide corresponding to this position is a base which can bind to more than one nucleotide, referred to herein as a “universal nucleobase.” For example, under this “wobble” pairing, inosine (I) binds to U, C or A; guanine (G) binds to U or C, and uridine (U) binds to U or C. Other examples of universal nucleobases include nitroindoles such as 5-nitroindole or 3-nitropyrrole (Loakes et al., Nucleosides and Nucleotides, 1995, 14, 1001-1003), the degenerate nucleotides dP or dK (Hill et al.), an acyclic nucleoside analog containing 5-nitroindazole (Van Aerschot et al., Nucleosides and Nucleotides, 1995, 14, 1053-1056) or the purine analog 1-(2-deoxy-β-D-ribofuranosyl)-imidazole-4-carboxamide (Sala et al., Nucl. Acids Res., 1996, 24, 3302-3306).

[0069] In another embodiment of the invention, to compensate for the somewhat weaker binding by the “wobble” base, the oligonucleotide primers are designed such that the first and second positions of each triplet are occupied by nucleotide analogs which bind with greater affinity than the unmodified nucleotide. Examples of these analogs include, but are not limited to, 2,6-diaminopurine which binds to thymine, 5-propynyluracil which binds to adenine and 5-propynylcytosine and phenoxazines, including G-clamp, which binds to G. Propynylated pyrimidines are described in U.S. Pat. Nos. 5,645,985, 5,830,653 and 5,484,908, each of which is commonly owned and incorporated herein by reference in its entirety. Propynylated primers are claimed in U.S. Ser. No. 10/294,203 which is also commonly owned and incorporated herein by reference in entirety. Phenoxazines are described in U.S. Pat. Nos. 5,502,177, 5,763,588, and 6,005,096, each of which is incorporated herein by reference in its entirety. G-clamps are described in U.S. Pat. Nos. 6,007,992 and 6,028,183, each of which is incorporated herein by reference in its entirety.

[0070] In other embodiments, non-template primer tags are used to increase the melting temperature (Tₘ) of a primer-template duplex in order to improve amplification efficiency. A non-template tag is designed to hybridize to at least three consecutive A or T nucleotide residues on a primer which are complementary to the template. In any given non-template tag, A can be replaced by C or G and T can also be replaced by C or G. The extra hydrogen bond in a G-C pair relative to a A-T pair confers increased stability of the primer-template duplex and improves amplification efficiency.

[0071] In other embodiments, propynylated tags may be used in a manner similar to that of the non-template tag, wherein two or more 5-propynylcytidine or 5-propynyluridine residues replace template matching residues on a primer.

[0072] In other embodiments, a primer contains a modified internucleoside linkage such as a phosphorothioate linkage, for example.

E. Characterization of Bioagent Identifying Amplicons

[0073] A theoretically ideal bioagent detector would identify, quantify, and report the complete nucleic acid sequence of every bioagent that reached the sensor. The complete sequence of the nucleic acid component of a pathogen would provide all relevant information about the threat, including its identity and the presence of drug-resistance or pathogenicity markers. This ideal has not yet been achieved. However, the present invention provides a straightforward strategy for obtaining information with the same practical value based on analysis of bioagent identifying amplicons by molecular mass determination.

[0074] In some cases, a molecular mass of a given bioagent identifying amplicon alone does not provide enough resolution to unambiguously identify a given bioagent. For example, the molecular mass of the bioagent identifying amplicon obtained using the intelligent primer pair “16S_{—}971” would be 55622 Da for both E. coli and Salmonella typhimurium. However, if additional intelligent primers are employed to analyze additional bioagent identifying amplicons, a “triangulation identification” process is enabled. For example, the “16S_{—}1100” intelligent primer pair yields molecular masses of 55009 and 55005 Da for E. coli and Salmonella typhimurium, respectively. Furthermore, the “23S_{—}855” intelligent primer pair yields molecular masses of 42656 and 42698 Da for E. coli and Salmonella typhimurium, respectively. In this basic example, the second and third intelligent primer pairs provided the additional “fingerprinting” capability or resolution to distinguish between the two bioagents.

[0075] In another embodiment, the triangulation identification process is pursued by measuring signals from a plurality of bioagent identifying amplicons selected within multiple core genes. This process is used to reduce false negative and false positive signals, and enable reconstruction of the origin of hybrid or otherwise engineered bioagents. In this process, after identification of multiple core genes, alignments are created from nucleic acid sequence databases. The alignments are then analyzed for regions of conservation and variation, and bioagent identifying amplicons are selected to distinguish bioagents based on specific genomic differences. For example, identification of the three part toxin genes typical of B. anthracis (Bowen et al., J. Appl. Microbiol., 1999, 87, 270-278) in the absence of the expected signatures from the B. anthracis genome would suggest a genetic engineering event.

[0076] The triangulation identification process can be pursued by characterization of bioagent identifying amplicons in a massively parallel fashion using the polymerase chain reaction (PCR), such as multiplex PCR, and mass spectrometric (MS) methods. Sufficient quantities of nucleic acids should be present for detection of bioagents by MS. A wide variety of techniques for preparing large amounts of purified nucleic acids or fragments thereof are well known to those of ordinary skill in the art. PCR requires one or more pairs of oligonucleotide primers that bind to regions which flank the target sequence(s) to be amplified. These primers prime synthesis of a different strand of DNA, with synthesis occurring in the direction of one primer towards the other primer. The primers, DNA to be amplified, a thermostable DNA polymerase (e.g. Taq polymerase), the four deoxynucleotide triphosphates, and a buffer are combined to initiate DNA synthesis. The solution is denatured by heating, then cooled to allow annealing of newly added primer, followed by another round of DNA synthesis. This process is typically repeated for about 30 cycles, resulting in amplification of the target sequence.

[0077] Although the use of PCR is suitable, other nucleic acid amplification techniques may also be used, including ligase chain reaction (LCR) and strand displacement amplification (SDA). The high-resolution MS technique allows separation of bioagent spectral lines from background spectral lines in highly cluttered environments.

[0078] In another embodiment, the detection scheme for the PCR products generated from the bioagent(s) incorporates at least three features. First, the technique simultaneously detects and differentiates multiple (generally about 6-10) PCR products. Second, the technique provides a molecular mass that uniquely identifies the bioagent from the possible primer sites. Finally, the detection technique is rapid, allowing multiple PCR reactions to be run in parallel.

F. Mass Spectrometric Characterization of Bioagent Identifying Amplicons

[0079] Mass spectrometry (MS)-based detection of PCR products provides a means for determination of BCS which has several advantages. MS is intrinsically a parallel detection scheme without the need for radioactive or fluorescent labels, since every amplification product is identified by its molecular mass. The current state of the art in mass spectrometry is such that less than femtomole quantities of material can be readily analyzed to afford information about the molecular contents of the sample. An accurate assessment of the molecular mass of the material can be quickly obtained, irrespective of whether the molecular weight of the sample is several hundred, or in excess of one hundred thousand atomic mass units (amu) or Daltons. Intact molecular ions can be generated from amplification products using one of a variety of ionization techniques to convert the sample to gas phase. These ionization methods include, but are not limited to, electrospray ionization (ES), matrix-assisted laser desorption ionization (MALDI) and fast atom bombardment (FAB). For example, MALDI of nucleic acids, along with examples of matrices for use in MALDI of nucleic acids, are described in WO 98/54751.

[0080] In some embodiments, large DNAs and RNAs, or large amplification products therefrom, can be digested with restriction endonucleases prior to ionization. Thus, for example, an amplification product that was 10 kDa could be digested with a series of restriction endonucleases to produce a panel of, for example, 100 Da fragments. Restriction endonucleases and their sites of action are well known to the skilled artisan. In this manner, mass spectrometry can be performed for the purposes of restriction mapping.

[0081] Upon ionization, several peaks are observed from one sample due to the formation of ions with different charges. Averaging the multiple readings of molecular mass obtained from a single mass spectrum affords an estimate of molecular mass of the bioagent. Electrospray ionization mass spectrometry (ESI-MS) is particularly useful for very high molecular weight polymers such as proteins and nucleic acids having molecular weights greater than 10 kDa, since it yields a distribution of multiply-charged molecules of the sample without causing a significant amount of fragmentation.

[0082] The mass detectors used in the methods of the present invention include, but are not limited to, Fourier transform ion cyclotron resonance mass spectrometry (FT-ICR-MS), ion trap, quadrupole, magnetic sector, time of flight (TOF), Q-TOF, and triple quadrupole.

[0083] In general, the mass spectrometric techniques which can be used in the present invention include, but are not limited to, tandem mass spectrometry, infrared multiphoton dissociation and pyrolytic gas chromatography mass spectrometry (PGC-MS). In one embodiment of the invention, the bioagent detection system operates continually in bioagent detection mode using pyrolytic GC-MS without PCR for rapid detection of increases in biomass (for example, increases in fecal contamination of drinking water or of germ warfare agents). To achieve minimal latency, a continuous sample stream flows directly into the PGC-MS combustion chamber. When an increase in biomass is detected, a PCR process is automatically initiated. Bioagent presence produces elevated levels of large molecular fragments from, for example, about 100-7,000 Da which are observed in the PGC-MS spectrum. The observed mass spectrum is compared to a threshold level and when levels of biomass are determined to exceed a predetermined threshold, the bioagent classification process described hereinabove (combining PCR and MS, such as FT-ICR MS) is initiated. Optionally, alarms or other processes (halting ventilation flow, physical isolation) are also initiated by this detected biomass level.

[0084] The accurate measurement of molecular mass for large DNAs is limited by the adduction of cations from the PCR reaction to each strand, resolution of the isotopic peaks from natural abundance ¹³C and ¹⁵N isotopes, and assignment of the charge state for any ion. The cations are removed by in-line dialysis using a flow-through chip that brings the solution containing the PCR products into contact with a solution containing ammonium acetate in the presence of an electric field gradient orthogonal to the flow. The latter two problems are addressed by operating with a resolving power of >100,000 and by incorporating isotopically depleted nucleotide triphosphates into the DNA. The resolving power of the instrument is also a consideration. At a resolving power of 10,000, the modeled signal from the (M−14H+)14− charge state of an 84 mer PCR product is poorly characterized and assignment of the charge state or exact mass is impossible. At a resolving power of 33,000, the peaks from the individual isotopic components are visible. At a resolving power of 100,000, the isotopic peaks are resolved to the baseline and assignment of the charge state for the ion is straightforward. The (¹³C, ¹⁵N)-depleted triphosphates are obtained, for example, by growing microorganisms on depleted media and harvesting the nucleotides (Batey et al., Nucl. Acids Res., 1992, 20, 4515-4523).

[0085] While mass measurements of intact nucleic acid regions are believed to be adequate to determine most bioagents, tandem mass spectrometry (MSⁿ) techniques may provide more definitive information pertaining to molecular identity or sequence. Tandem MS involves the coupled use of two or more stages of mass analysis where both the separation and detection steps are based on mass spectrometry. The first stage is used to select an ion or component of a sample from which further structural information is to be obtained. The selected ion is then fragmented using, e.g., blackbody irradiation, infrared multiphoton dissociation, or collisional activation. For example, ions generated by electrospray ionization (ESI) can be fragmented using IR multiphoton dissociation. This activation leads to dissociation of glycosidic bonds and the phosphate backbone, producing two series of fragment ions, called the w-series (having an intact 3′ terminus and a 5′ phosphate following internal cleavage) and the a-Base series(having an intact 5′ terminus and a 3′ furan).

[0086] The second stage of mass analysis is then used to detect and measure the mass of these resulting fragments of product ions. Such ion selection followed by fragmentation routines can be performed multiple times so as to essentially completely dissect the molecular sequence of a sample.

[0087] If there are two or more targets of similar molecular mass, or if a single amplification reaction results in a product which has the same mass as two or more bioagent reference standards, they can be distinguished by using mass-modifying “tags.” In this embodiment of the invention, a nucleotide analog or “tag” is incorporated during amplification (e.g., a 5-(trifluoromethyl)deoxythymidine triphosphate) which has a different molecular weight than the unmodified base so as to improve distinction of masses. Such tags are described in, for example, PCT WO97/33000, which is incorporated herein by reference in its entirety. This further limits the number of possible base compositions consistent with any mass. For example, 5-(trifluoromethyl)deoxythymidine triphosphate can be used in place of dTTP in a separate nucleic acid amplification reaction. Measurement of the mass shift between a conventional amplification product and the tagged product is used to quantitate the number of thymidine nucleotides in each of the single strands. Because the strands are complementary, the number of adenosine nucleotides in each strand is also determined.

[0088] In another amplification reaction, the number of G and C residues in each strand is determined using, for example, the cytosine analog 5-methylcytosine (5-meC) or 5-propynylcytosine. The combination of the A/T reaction and G/C reaction, followed by molecular weight determination, provides a unique base composition. This method is summarized in FIG. 4 and Table 1.

TABLE 1

Mass Tagging of G and C Residues

| | | | | | | Total | Total |
|---|---|---|---|---|---|---|---|
| | | | Total | Base | Base | base | base |
| | | | mass | info | info | comp. | comp. |
| | Double strand | Single strand | this | this | other | Top | Bottom |
| Mass tag | sequence | Sequence | strand | strand | strand | strand | strand |
| T*.mass | T*ACGT*ACGT* | T*ACGT*ACGT* | 3x | 3T | 3A | 3T | 3A |
| (T*-T) = x | AT*GCAT*GCA | | | | | 2A | 2T |
| | | | | | | 2C | 2G |
| | | | | | | 2G | 2C |
| | | AT*GCAT*GCA | 2x | 2T | 2A | | |
| C*.mass | TAC*GTAC*GT | TAC*GTAC*GT | 2x | 2C | 2G | | |
| (C*-C) = y | ATGC*ATGC*A | | | | | | |
| | | ATGC*ATGC*A | 2x | 2C | 2G | | |

[0089] The mass tag phosphorothioate A (A*) was used to distinguish a Bacillus anthracis cluster. The B. anthracis (A₁₄G₉C₁₄T₉) had an average MW of 14072.26, and the B. anthracis (A₁A*₁₃G₉C₁₄T₉) had an average molecular weight of 14281.11 and the phosphorothioate A had an average molecular weight of +16.06 as determined by ESI-TOF MS. The deconvoluted spectra are shown in FIG. 5.

[0090] In another example, assume the measured molecular masses of each strand are 30,000.115 Da and 31,000.115 Da respectively, and the measured number of dT and dA residues are (30,28) and (28,30). If the molecular mass is accurate to 100 ppm, there are 7 possible combinations of dG+dC possible for each strand. However, if the measured molecular mass is accurate to 10 ppm, there are only 2 combinations of dG+dC, and at 1 ppm accuracy there is only one possible base composition for each strand.

[0091] Signals from the mass spectrometer may be input to a maximum-likelihood detection and classification algorithm such as is widely used in radar signal processing. The detection processing uses matched filtering of BCS observed in mass-basecount space and allows for detection and subtraction of signatures from known, harmless organisms, and for detection of unknown bioagent threats. Comparison of newly observed bioagents to known bioagents is also possible, for estimation of threat level, by comparing their BCS to those of known organisms and to known forms of pathogenicity enhancement, such as insertion of antibiotic resistance genes or toxin genes.

[0092] Processing may end with a Bayesian classifier using log likelihood ratios developed from the observed signals and average background levels. The program emphasizes performance predictions culminating in probability-of-detection versus probability-of-false-alarm plots for conditions involving complex backgrounds of naturally occurring organisms and environmental contaminants. Matched filters consist of a priori expectations of signal values given the set of primers used for each of the bioagents. A genomic sequence database (e.g. GenBank) is used to define the mass basecount matched filters. The database contains known threat agents and benign background organisms. The latter is used to estimate and subtract the signature produced by the background organisms. A maximum likelihood detection of known background organisms is implemented using matched filters and a running-sum estimate of the noise covariance. Background signal strengths are estimated and used along with the matched filters to form signatures which are then subtracted. the maximum likelihood process is applied to this “cleaned up” data in a similar manner employing matched filters for the organisms and a running-sum estimate of the noise-covariance for the cleaned up data.

G. Base Composition Signatures as Indices of Bioagent Identifying Amplicons

[0093] Although the molecular mass of amplification products obtained using intelligent primers provides a means for identification of bioagents, conversion of molecular mass data to a base composition signature is useful for certain analyses. As used herein, a “base composition signature” (BCS) is the exact base composition determined from the molecular mass of a bioagent identifying amplicon. In one embodiment, a BCS provides an index of a specific gene in a specific organism.

[0094] Base compositions, like sequences, vary slightly from isolate to isolate within species. It is possible to manage this diversity by building “base composition probability clouds” around the composition constraints for each species. This permits identification of organisms in a fashion similar to sequence analysis. A “pseudo four-dimensional plot” can be used to visualize the concept of base composition probability clouds. Optimal primer design requires optimal choice of bioagent identifying amplicons and maximizes the separation between the base composition signatures of individual bioagents. Areas where clouds overlap indicate regions that may result in a misclassification, a problem which is overcome by selecting primers that provide information from different bioagent identifying amplicons, ideally maximizing the separation of base compositions. Thus, one aspect of the utility of an analysis of base composition probability clouds is that it provides a means for screening primer sets in order to avoid potential misclassifications of BCS and bioagent identity.

[0095] Another aspect of the utility of base composition probability clouds is that they provide a means for predicting the identity of a bioagent whose exact measured BCS was not previously observed and/or indexed in a BCS database due to evolutionary transitions in its nucleic acid sequence.

[0096] It is important to note that, in contrast to probe-based techniques, mass spectrometry determination of base composition does not require prior knowledge of the composition in order to make the measurement, only to interpret the results. In this regard, the present invention provides bioagent classifying information similar to DNA sequencing and phylogenetic analysis at a level sufficient to detect and identify a given bioagent. Furthermore, the process of determination of a previously unknown BCS for a given bioagent (for example, in a case where sequence information is unavailable) has downstream utility by providing additional bioagent indexing information with which to populate BCS databases. The process of future bioagent identification is thus greatly improved as more BCS indexes become available in the BCS databases.

[0097] Another embodiment of the present invention is a method of surveying bioagent samples that enables detection and identification of all bacteria for which sequence information is available using a set of twelve broad-range intelligent PCR primers. Six of the twelve primers are “broad range survey primers” herein defined as primers targeted to broad divisions of bacteria (for example, the Bacillus/Clostridia group or gamma-proteobacteria). The other six primers of the group of twelve primers are “division-wide” primers herein defined as primers which provide more focused coverage and higher resolution. This method enables identification of nearly 100% of known bacteria at the species level. A further example of this embodiment of the present invention is a method herein designated “survey/drill-down” wherein a subspecies characteristic for detected bioagents is obtained using additional primers. Examples of such a subspecies characteristic include but are not limited to: antibiotic resistance, pathogenicity island, virulence factor, strain type, sub-species type, and clade group. Using the survey/drill-down method, bioagent detection, confirmation and a subspecies characteristic can be provided within hours. Moreover, the survey/drill-down method can be focused to identify bioengineering events such as the insertion of a toxin gene into a bacterial species that does not normally make the toxin.

H. Use of Bioagent Identifying Amplicons for Identification of RNA Viruses

[0098] Coronaviruses represent RNA virus examples of bioagents which can be identified by the methods of the present invention.

[0099] Examples of (−)-strand RNA viral genera include arenaviruses, bunyaviruses, and mononegavirales. Species that are members of the arenavirus genus include, but are not limited to, are sabia virus, lassa fever virus, Machupo Virus, Argentine hemorrhagic fever virus, and flexal virus. Species that are members of the bunyavirus genus include, but are not limited, to hantavirus, nairovirus, phlebovirus, hantaan virus, Congo-Crimean hemorrhagic fever, and rift valley fever. Species that are members of the monoegavirales genus include, but are not limited to, filovirus, paramyxovirus, ebola virus, Marburg, and equine morbillivirus.

[0100] Examples of (+)-strand RNA viral genera include, but are not limited to, picornaviruses, astroviruses, calciviruses, nidovirales, flaviviruses, and togaviruses. Species of the picornavirus genus include, but are not limited to, coxsackievirus, echovirus, human coxsackievirus A, human echovirus, human enterovirus, human poliovirus, hepatitis A virus, human parechovirus, and human rhinovirus. A species of the astrovirus genus, includes but is not limited to, human astrovirus. Species of the calcivirus genus include, but are not limited to, chiva virus, human calcivirus, and norwalk virus. Species of the nidovirales genus include, but are not limited to coronavirus and torovirus. Species of the flavivirus genus include, but are not limited to, Alfuy virus, Alkhurma virus, Apoi virus, Aroa virus, Bagaza virus, Banzi virus, Batu cave virus, Bouboui virus, Bukalasa bat virus, Bussliquara virus, Cacipacore virus, Carey island virus, Cowbone ridge virus, Dakar bat virus, Deer tick virus, Dengue virus type 1, Dengue virus type 2, Dengue virus type 3, Dengue virus type 4, Edge hill virus, Entebbe bat virus, Flavivirus sp., Gadgets gully virus, Hepatitis C virus, Iguape virus, Ilheus virus, Israel turkey meningoencephalitis virus, Japanese encephalities virus, Jugra virus, Jutiapa virus, Kadam virus, Kedougou virus, Kokobera virus, Koutango virus, Kunjin virus, Kyasanur forest disease virus, Langata virus, Louping III virus, Maeban virus, Modoc virus, Montana myotic leukoencephalitis virus, Murray Valley encephalitis virus, Naranjal virus, Negishi virus, Ntaya virus, Omsk hemorrhagic fever virus, Phnom-Penh bat virus, Potiskum virus, Powassan virus, Rio bravo virus, Rocio virus, Royal farm virus, Russian spring-summer encephalitis virus, Saboya virus, Saint Louis encephalitis virus, Sal vieja virus, San perlita virus, Saumarez reef virus, Sepik virus, Sitiawan virus, Sokuluk virus, Spondweni virus, Stratford virus, Tembusu virus, Tick-borne encephalitis virus, Tyulenly virus, Uganda 5 virus, Usutu virus, West Nile virus, and Yellow fever virus. Species of the togavirus genus include, but are not limited to, Chikugunya virus, Eastern equine encephalitis virus, Mayaro virus, O'nyong-nyong virus, Ross river virus, Venezuelan equine encephalitis virus, Rubella virus, and hepatitis E virus. The hepatitis C virus has a 5′-untranslated region of 340 nucleotides, an open reading frame encoding 9 proteins having 3010 amino acids and a 3′-untranslated region of 240 nucleotides. The 5′-UTR and 3′-UTR are 99% conserved in hepatitis C viruses.

[0101] Species of retroviruses include, but are not limited to, human immunodeficiency virus and hepatitis B virus.

[0102] In one embodiment of the present invention, the target gene is an RNA-dependent RNA polymerase or a helicase encoded by (+)-strand RNA viruses, or RNA polymerase from a (−)-strand RNA virus. (+)-strand RNA viruses are double stranded RNA and replicate by RNA-directed RNA synthesis using RNA-dependent RNA polymerase and the positive strand as a template. Helicase unwinds the RNA duplex to allow replication of the single stranded RNA. These viruses include viruses from the genera picornaviridae, togaviridae, flaviviradae, arenaviridae, cononaviridae (e.g., human respiratory virus) and Hepatitis A virus. The genes encoding these proteins comprise variable and highly conserved regions which flank the variable regions. The genes can be used to identify-the species of the virus and if necessary the strain of the viral species.

[0103] In some embodiments of the present invention, RNA viruses are identified by first obtaining RNA from an RNA virus, obtaining corresponding DNA from the RNA via reverse transcription, amplifying the DNA to obtain one or more amplification products using one or more pairs of oligonucleotide primers that bind to conserved regions of the RNA viral genome, which flank a variable region of the genome, determining the molecular mass or base composition of the one or more amplification products and comparing the molecular masses or base compositions with calculated or experimentally determined molecular masses or base compositions of known RNA viruses wherein at least one match identifies the RNA virus.

[0104] In one embodiment of the present invention, the RNA virus is a coronavirus. In other embodiments, the coronavirus includes but is not limited to, a member of the following group of coronaviruses: avian infectious bronchitis, bovine coronavirus, canine coronavirus, feline infectious peritonitis virus, human coronavirus 229E, human coronavirus OC43, murine hepatitis virus, porcine epidemic diarrhea virus, porcine hemagglutinating encephalomyelitis virus, rat sialodacryoadenitis coronavirus, SARS coronavirus, transmissible gastroenteritis virus and turkey coronavirus.

[0105] In other embodiments of the present invention, the intelligent primers produce bioagent identifying amplicons within stable and highly conserved regions of coronaviral genomes. The advantage to characterization of an amplicon in a highly conserved region is that there is a low probability that the region will evolve past the point of primer recognition, in which case, the amplification step would fail. Such a primer set is thus useful as a broad range survey-type primer. In one embodiment of the present invention, an example of a highly conserved region of coronaviruses is the gene encoding RNA-dependent RNA polymerase (RdRp). In another embodiment of the present invention, the intelligent primers produce bioagent identifying amplicons in a region which evolves more quickly than the stable region described above. The advantage of characterization bioagent identifying amplicon corresponding to an evolving genomic region is that it is useful for distinguishing emerging strain variants. In another embodiment, an example of an evolving genomic region of coronaviruses is the gene encoding nsp11.

[0106] The present invention also has significant advantages as a platform for identification of diseases caused by emerging coronaviruses. The present invention eliminates the need for prior knowledge of sequence to generate hybridization probes. Thus, in another embodiment, the present invention provides a means of determining the etiology of a coronavirus infection when the process of identification of coronaviruses is carried out in a clinical setting and, even when the coronavirus is a new species never observed before (as used herein, the term “etiology” refers to the causes or origins, of diseases or abnormal physiological conditions). This is possible because the methods are not confounded by naturally occurring evolutionary variations (a major concern for characterization of viruses which evolve rapidly) occurring in the sequence acting as the template for production of the bioagent identifying amplicon. Measurement of molecular mass and determination of base composition is accomplished in an unbiased manner without sequence prejudice.

[0107] Another embodiment of the present invention also provides a means of tracking the spread of any species or strain of coronavirus when a plurality of samples obtained from different locations are analyzed by the methods described above in an epidemiological setting. In one embodiment, a plurality of samples from a plurality of different locations are analyzed with primers which produce bioagent identifying amplicons, a subset of which contain a specific coronavirus. The corresponding locations of the members of the coronavirus-containing subset indicate the spread of the specific coronavirus to the corresponding locations.

[0108] In another embodiment, the present invention also provides kits for carrying out the methods described herein. In some embodiments, the kit may comprise a sufficient quantity of one or more primer pairs to perform an amplification reaction on a target polynucleotide from a bioagent to form a bioagent identifying amplicon. In some embodiments, the kit may comprise from one to fifty primer pairs, from one to twenty primer pairs, from one to ten primer pairs, or from two to five primer pairs. In some embodiments, the kit may comprise one or more primer pairs recited in Table 2. In some embodiments, the kit may comprise broad range survey primers, division wide primers, or drill-down primers, or any combination thereof. A kit may be designed so as to comprise particular primer pairs for identification of a particular bioagent. For example, a broad range survey primer kit may be used initially to identify an unknown bioagent as a coronavirus. Another kit may be used to distinguish any coronavirus from any other coronavirus. In some embodiments, any of these kits may be combined to comprise a combination of broad range survey primers and division-wide primers so as to be able to identify the species of an unknown bioagent.

[0109] The kit may also comprise a sufficient quantity of reverse transcriptase, a DNA polymerase, suitable nucleoside triphosphates (including any of those described above), a DNA ligase, and/or reaction buffer, or any combination thereof, for the amplification processes described above. A kit may further include instructions pertinent for the particular embodiment of the kit, such instructions describing the primer pairs and amplification conditions for operation of the method. A kit may also comprise amplification reaction containers such as microcentrifuge tubes and the like. A kit may also comprise reagents for isolating bioagent nucleic acid, including, for example, detergent. A kit may also comprise a table of measured or calculated molecular masses and/or base compositions of bioagents using the primer pairs of the kit.

[0110] The present invention is also directed to methods of characterizing a double etiology of a subject presenting at least one symptom of SARS comprising: contacting nucleic acid from a sample from the subject with a first pair of oligonucleotide primers which hybridize to conserved sequences of a coronavirus, wherein said conserved sequences of a coronavirus flank a variable nucleic acid sequence; contacting nucleic acid from the sample with a second pair of oligonucleotide primers which hybridize to conserved sequences of a putative secondary bioagent(s), wherein the sequences of putative secondary bioagents flank a variable sequence; amplifying the variable nucleic acid sequences between the first pair of primers and the second pair of primers to produce a coronavirus amplification product and a secondary bioagent amplification product; determining the base composition signature of each of the amplification products; using the base composition signatures of each of the amplification products to identify the combination of a SARS-linked coronavirus and a secondary bioagent as a probable cause of the at least one symptom of SARS. In some embodiments, the secondary bioagent correlates with increased severity of the at least one symptom of SARS. In some embodiments, the secondary bioagent correlates with increased incidence of mortality of subjects presenting the at least one symptom of SARS. In some embodiments, the at least one symptom of SARS is high fever (>38° C.), dry cough, shortness of breath, headache, muscular stiffness, loss of appetite, malaise, confusion, rash, or diarrhea, or any combination thereof. In some embodiments, the double etiology comprises a synergistic viral infection of a SARS-linked coronavirus and a secondary virus. In some embodiments, the secondary virus is adenovirus, parainfluenza virus, respiratory syncytial virus, measles virus, chicken pox virus, or influenza virus, or any combination thereof. In some embodiments, the double etiology comprises a synergistic viral/bacterial infection of a SARS-linked coronavirus and a secondary bacterial agent. In some embodiments, the secondary bacterial agent is Streptococcus pneumoniae, Mycoplasma pneumoniae, or Chlamydia trachomatis, or any combination thereof. In some embodiments, the contacting steps are performed in parallel. In some embodiments, the contacting steps are performed simultaneously.

[0111] The present invention is also directed to methods of identifying the etiology of a subject presenting at least one symptom of SARS comprising: employing the method described above to rule out the presence of a SARS-linked coronavirus in a sample, wherein lack of amplification of a SARS-linked coronavirus by the first pair of primers indicates absence of a SARS-linked coronavirus, and wherein the base composition signature of the amplification product of the second pair of primers identifies the secondary bioagent, thereby indicating the etiology of the at least one symptom of SARS. In some embodiments, the secondary bioagent is the cause of an acute respiratory infection. In some embodiments, the secondary bioagent is a bacterial agent such as, for example, Streptococcus pneumoniae, Mycoplasma pneumoniae or Chlalmydia trachomatis. In some embodiments, the secondary bioagent is a viral agent such as, for example, adenoviruses, parainfluenza, respiratory syncytial virus, measles virus, chicken pox virus, or influenza virus.

### EXAMPLES

### Example 1

### Coronavirus Samples, Nucleic Acid Isolation and Amplification

[0112] HRT-18 and MRC5 cell lines were inoculated with HCoV-OC43 and HcoV-229E (University of Colorado and Naval Health Research Center, San Diego, Calif.), HcoV-229E. SARS RNA was obtained the CDC (Atlanta, Ga.) as a 1 mL extract of SARS coronavirus in TRIzol extraction buffer. The SARS CoV-Tor2 strain was obtained from the University of Manitoba as a cell culture supernatant from infected Vero-E6 cells.

[0113] RNA was isolated from 250 μL of coronavirus infected cells or culture supernatant using Trizol or Trizol LS respectively (Invitrogen Inc., Carlsbad, Calif.) according to the manufacturer's protocol. 5 μg of sheared poly A DNA was added for the precipitation of the RNA. The pelleted nucleic acids were washed in 70% ethanol and resuspended in 100 μL DEPC-treated water containing 20 units of Superase•In™ (Ambion, Austin, Tex.). The resuspended RNA was purified using the Qiagen RNAeasy mini kit according to the manufacturer's protocol. The RNA was eluted from the RNAeasy™ columns in 30 μL of DEPC-treated water and was stored at −70° C.

[0114] Purified RNA was primed for reverse transcription by mixing 10 μL of the purified RNA with 5 μL DEPC-treated water containing 500 ng random primers, 1 μg of sheared poly-A DNA and 10 units Superase•In™. The mixture was heated to 60° C. for 5 minutes and then cooled to 4° C. Following the annealing of the random primers to the RNA, 15 μL of first strand reaction mix consisting of 2× first strand buffer (Invitrogen Inc., Carlsbad, Calif.), 10 mM DTT, 500 μM dNTPs, and 75 units of SuperScript II was added to the RNA primer mixture. The RNA was reversed transcribed for 45 minutes at 45° C. Various dilutions of the reverse transcription reaction mixes were used directly in the PCR reactions.

[0115] All PCR reactions were performed in 50 μL using 96-well microtiter plates and M.J. Dyad thermocyclers (MJ research, Waltham, Mass.). The PCR reaction buffer consisted of 4 units of Amplitaq Gold, 1× buffer II (Applied Biosystems, Foster City, Calif.), 2.0 mM MgCl₂, 0.4 M betaine, 800 μM dNTP mix, and 250 nM propyne containing PCR primers. The following PCR conditions were used to amplify coronavirus sequences: 95° C. for 10 min followed by 50 cycles of 95° C. for 30 sec, 50° C. for 30 sec, and 72° C. for 30 sec.

[0116] 20 μL of each crude PCR product was transferred into a 96-well plate. Pretreated anion exchange ZipTips™ (Millipore) were loaded onto the head of a 96-tip Evolution P3 (Perkin Elmer), and then a 20 μL aliquot of crude PCR product was loaded onto each tip by repeatedly aspirating and expelling the 20 μL aliquot. Following sample loading, aliquots of 40 mM NH₄HCO₃ were used to wash each sample six times to remove unconsumed primers and dNTPs. This step was followed by rinses with 10 μL aliquots of a 20% MeOH solution to remove any residual polymeric material that originated from polymerase or PCR buffer. Elution of the final purified/desalted PCR products was accomplished by rinsing each tip with a 10 μL aliquot of 0.4 M NH₄OH and dispensing the 10 μL eluent into a well of a 96-well plate. Prior to analysis by ESI-MS, the eluent was diluted 1:1 with a solution containing 50% MeOH and 50 mM piperidine/imidizaole. A small oligonucleotide designated SH2 (CGTGCATGGCGG; SEQ ID NO:105, Synthetic Genetics, San Diego, Calif.) was added as an internal mass standard at a final concentration of 50 nM.

### Example 2

### Molecular Mass Determination

[0117] The mass spectrometer is based on a Bruker Daltonics (Billerica, Mass.) Apex II 70e electrospray ionization Fourier transform ion cyclotron resonance mass spectrometer (ESI-FTICR-MS) that employs an actively shielded 7 Tesla superconducting magnet. All aspects of pulse sequence control and data acquisition were performed on a 1.1 GHz Pentium II data station running Bruker's Xmass software. 20 μL sample aliquots were extracted directly from 96-well microtiter plates using a CTC HTS PAL autosampler (LEAP Technologies, Carrboro, N.C.) triggered by the data station. Samples were injected directly into the ESI source at a flow rate of 75 μL/hr. Ions were formed via electrospray ionization in a modified Analytica (Branford, Conn.) source employing an off axis, grounded electrospray probe positioned ca. 1.5 cm from the metalized terminus of a glass desolvation capillary. The atmospheric pressure end of the glass capillary is biased at 6000 V relative to the ESI needle during data acquisition. A counter-current flow of dry N₂/O₂ was employed to assist in the desolvation process. Ions were accumulated in an external ion reservoir comprised of an rf-only hexapole, a skimmer cone, and an auxiliary gate electrode, prior to injection into the trapped ion cell where they were mass analyzed. Spectral acquisition was performed in the continuous duty cycle mode whereby ions were accumulated in the hexapole ion reservoir simultaneously with ion detection in the trapped ion cell. Following a 1.2 ms transfer event, in which ions were transferred to the trapped ion cell, the ions were subjected to a 1.6 ms chirp excitation corresponding to 8000-500 m/z. Data was acquired over an m/z range of 500-5000 (1M data points over a 225K Hz bandwidth). Each spectrum was the result of co-adding 32 transients. Transients were zero-filled once prior to the magnitude mode Fourier transform and post calibration using the internal mass standard. The ICR-2LS software package (G. A. Anderson, J. E. Bruce. (Pacific Northwest National Laboratory, Richland, Wash., 1995)) was used to deconvolute the mass spectra and calculate the mass of the monoisotopic species using an “averaging” fitting routine (M. W. Senko, S. C. Beu, F. W. McLafferty, Journal of the American Society for Mass Spectrometry 6, 229 (1995)) modified for DNA. Using this approach, monoisotopic molecular weights were calculated.

### Example 3

### Selection of Primers

[0118] To design primers that amplify all known coronavirus species and to identify new members, alignments were carried out using all available coronavirus sequences from GenBank, including complete genomes and individual genes, and scanned for regions where pairs of PCR primers would generate bioagent identifying amplicons of a length of about 150 or fewer nucleobases. The current length limit of about 150 nucleobases is dictated by the ability of electrospray mass spectroscopy to determine the mass of a PCR amplification product with sufficient accuracy to unambiguously determine the base composition. One with ordinary skill in the art will recognize that this limit may increase subject to improvements in the art of molecular mass determination of nucleic acids.

[0119] Two target regions were selected in coronavirus orf-1b, one in the RNA-dependent RNA polymerase (RdRp) and the other in Nsp11 (FIG. 7). Locations of primers within these regions were optimized for sensitivity and broad-range priming potential simultaneously by performing limiting dilutions of multiple, diverse coronaviruses. The primer pair names shown in Table 2 refer to the forward and reverse primer for a given region. Each primer was designed to include a thymidine (T) nucleotide on the 5′ end to minimize addition of non-templated adenosine (A) during PCR.

[0120] Table 2 represents the collection of intelligent primers (SEQ ID NOs:5-11) designed to identify coronaviruses using the method of the present invention. The forward or reverse primer name indicates the gene region of coronavirus genome to which the primer hybridizes relative to a reference sequence, in this case, the human coronavirus 229E sequence. The primers represented by SEQ ID NOs:5 and 6 were designed to yield an amplicon originating from a coronavirus nsp11 gene with reference to GenBank Accession No: NC_{—}002645 (incorporated herein as SEQ ID NO:30). The primers represented by SEQ ID NOs:7-11 were designed to yield an amplicon originating from a coronavirus RNA-dependent RNA polymerase gene with reference to GenBank Accession No: AF304460 (incorporated herein as SEQ ID NO: 31). In Table 2, @=5-propynyluracil (which is a chemically modified version of T); &=5-propynylcytosine (which is a chemically modified version of C).

TABLE 2

Primer Pairs for Identification of Coronaviruses

| | | | | | |
|---|---|---|---|---|---|
| Forward | | SEQ | Reverse | | SEQ |
| primer | | ID | primer | | ID |
| name | Forward sequence | NO: | name | Reverse sequence | NO: |

| | | | | | |
|---|---|---|---|---|---|
| CV_NC002645_18 | TGTTTGTTTTGGAATTGTAATGTTGA | 5 | CV_NC002645_183 | TGGAATGCATGCTTATTAACATACA | 6 |
| 190_18215_F | | | 02_18326_R | | |
| CV_NC002645_18 | TGTTTG&&&&GGAATTGTAATGTTGA | 5 | CV_NC002645_183 | TGGAATGCATGC&&A&&AACATACA | 6 |
| 190_182152_F | | | 02_18326_2_R | | |
| CVPOL_AF304460_ | TAAGTTTTATGGCGGGTGGGA | 7 | CVPOL_AF304460_ | TTTAGGGTAGTCCCAACCCAT | 8 |
| 1737_1757_F | | | 1804_1824_R | | |
| CVPOL_AF304460_ | TAAGTTTTATGGCGGGTGG | 9 | CVPOL_AF304460_ | TTTAGGGTAGTCCCAACCCAT | 8 |
| 1737_1755_F | | | 1804_1824_2_R | | |
| CVPOL_AF304460_ | TAAG&&T&ATGGCGGG&GG | 9 | CVPOL_AF304460_ | TTTAGGATAGT@@@AACCCAT | 10 |
| 1737_1755P_F | | | 1804_1824_2_R | | |
| CVPOL_AF304460_ | TAAGTTTTATGGCGGCTGG | 11 | CVPOL_AF304460_ | TTTAGGGTAGTCCCAACCCAT | 8 |
| 1737_1755_2_F | | | 1804_1824_2_R | | |
| CVPOL_AF304460_ | TAAG&&T&ATGGCGGC&GG | 11 | CVPOL_AF304460_ | TTTAGGATAGT@@@AACCCAT | 10 |
| 1737_1755_2P_ | | | 1804_1824_2P_R | | |
| F | | | | | |
| CVPOL_AF304460_ | TAAGTTTTATGGCGGGTGG | 9 | CV2OL_AF304460_ | TTTAGGATAGTCCCAACCCAT | 10 |
| 1737_1755_F | | | 1804_1824_3_R | | |

### Example 4

### Database of Bioagent Identifying Amplicons for Coronaviruses

[0121] A database of expected molecular masses and base compositions of bioagent identifying amplicons was generated using an electronic PCR search algorithm (ePCR). An existing RNA structure search algorithm (T. Macke et al., Nuc. Acids Res. 29, 4724 (2001)) was modified to include PCR parameters such as hybridization conditions, mismatches, and thermodynamic calculations (J. SantaLucia, Proc. Natl. Acad. Sci. U.S.A 95, 1460 (1998)). ePCR was used first to check primer specificity and the selected primer pairs were searched against GenBank nucleotide sequence database for matches to the primer sequences. ePCR showed that the coronavirus primers should prime all known coronaviruses in GenBank, but should not prime bacterial, viral, or human DNA sequences. For each match, A, G, C, and T base counts of the predicted amplicon sequence were calculated and a database of coronavirus bioagent identifying amplicons was created (Table 3).

[0122] Shown in Table 3 are molecular masses and base compositions of both strands of bioagent identifying amplicons for a series of different coronaviruses obtained using primer sets CV_NC002645_{—}18190_{—}18215P_F (nsp11 primer set SEQ ID NOs: 5 and 6) and VPOL_AF304460_{—}1737_{—}1755P_F (RdRp primer set SEQ ID NOs: 9 and 10).

TABLE 3
Database of Molecular Masses and Base Compositions for Coronavirus Bioagent Identifying Amplicons

| | | | | | | Forward | | Opposite |
|---|---|---|---|---|---|---|---|---|
| | | | | SEQ | Forward | Strand | Opposite | Strand |
| Primer | | | | ID | Strand | Base | Strand Exact | Base |
| Pair | Coronavirus | STRAIN | ACCESSION | NO: | Exact Mass | Composition | Mass | Composition |
| RdRp | Avian | Beaudette | Z30541.1 | 12 | 27396.5334 | A24 G24 | 27032.54201 | A26 G14 |
| | infectious | | | | | C14 T26 | | C24 T24 |
| | bronchitis | | | | | | | |
| | virus | | | | | | | |
| nsp11 | Avian | Beaudette | Z30541.1 | 12 | 42530.9462 | A33 G32 | 42129.10847 | A55 G17 |
| | infectious | | | | | C17 T55 | | C32 T33 |
| | bronchitis | | | | | | | |
| | virus | | | | | | | |
| RdRp | Avian | Beaudette | Z69629.1 | 13 | 27396.5334 | A24 G24 | 27032.54201 | A26 G14 |
| | infectious | | | | | C14 T26 | | C24 T24 |
| | bronchitis | | | | | | | |
| | virus | | | | | | | |
| RdRp | Avian | Beaudette | M95169.1 | 14 | 27396.5334 | A24 G24 | 27032.54201 | A26 G14 |
| | infectious | | | | | C14 T26 | | C24 T24 |
| | bronchitis | | | | | | | |
| | virus | | | | | | | |
| nsp11 | Avian | Beaudette | M95169.1 | 14 | 42530.9462 | A33 G32 | 42129.10847 | A55 G17 |
| | infectious | | | | | C17 T55 | | C32 T33 |
| | bronchitis | | | | | | | |
| | virus | | | | | | | |
| RdRp | Avian | Beaudette | NC_001451.1 | 15 | 27396.5334 | A24 G24 | 27032.54201 | A26 G14 |
| | infectious | | | | | C14 T26 | | C24 T24 |
| | bronchitis | | | | | | | |
| | virus | | | | | | | |
| nsp11 | Avian | Beaudette | NC_001451.1 | 15 | 42530.9462 | A33 G32 | 42129.10847 | A55 G17 |
| | infectious | | | | | C17 T55 | | C32 T33 |
| | bronchitis | | | | | | | |
| | virus | | | | | | | |
| RdRp | Avian | Beaudette | M94356.1 | 16 | 27396.5334 | A24 G24 | 27032.54201 | A26 G14 |
| | infectious | (M42) | | | | C14 T26 | | C24 T24 |
| | bronchitis | | | | | | | |
| | virus | | | | | | | |
| nsp11 | Avian | Beaudette | M94356.1 | 16 | 42530.9462 | A33 G32 | 42129.10847 | A55 G17 |
| | infectious | (M42) | | | | C17 T55 | | C32 T33 |
| | bronchitis | | | | | | | |
| | virus | | | | | | | |
| RdRp | Avian | Beaudette | AJ311317.1 | 17 | 27396.5334 | A24 G24 | 27032.54201 | A26 G14 |
| | infectious | CK | | | | C14 T26 | | C24 T24 |
| | bronchitis | | | | | | | |
| | virus | | | | | | | |
| nsp11 | Avian | Beaudette | AJ311317.1 | 17 | 42530.9462 | A33 G32 | 42129.10847 | A55 G17 |
| | infectious | CK | | | | C17 T55 | | C32 T33 |
| | bronchitis | | | | | | | |
| | virus | | | | | | | |
| RdRp | Avian | BJ | AY319651.1 | 18 | 27413.56129 | A27 G23 | 27013.52362 | A25 G13 |
| | infectious | | | | | C13 T25 | | C23 T27 |
| | bronchitis | | | | | | | |
| | virus | | | | | | | |
| nsp11 | Avian | BJ | AY319651.1 | 18 | 42502.91625 | A31 G31 | 42155.14792 | A59 G16 |
| | infectious | | | | | C16 T59 | | C31 T31 |
| | bronchitis | | | | | | | |
| | virus | | | | | | | |
| RdRp | Avian | LX4 | AY223860.1 | 19 | 27419.54938 | A26 G23 | 27006.54027 | A27 G12 |
| | infectious | | | | | C12 T27 | | C23 T26 |
| | bronchitis | | | | | | | |
| | virus | | | | | | | |
| RdRp | Avian | LX4 | AY338732.1 | 20 | 27419.54938 | A26 G23 | 27006.54027 | A27 G12 |
| | infectious | | | | | C12 T27 | | C23 T26 |
| | bronchitis | | | | | | | |
| | virus | | | | | | | |
| nsp11 | Avian | LX4 | AY338732.1 | 20 | 42532.97442 | A36 G31 | 42126.085 | A53 G17 |
| | infectious | | | | | C17 T53 | | C31 T36 |
| | bronchitis | | | | | | | |
| | virus | | | | | | | |
| RdRp | Bovine | BCoV-ENT | AF391541.1 | 21 | 27358.49663 | A22 G22 | 27066.59778 | A32 G12 |
| | coronavirus | | | | | C12 T32 | | C22 T22 |
| nsp11 | Bovine | BCoV-ENT | AF391541.1 | 21 | 42606.00337 | A38 G32 | 42052.0608 | A52 G15 |
| | coronavirus | | | | | C15 T52 | | C32 T38 |
| RdRp | Bovine | BCoV-LUN | AF391542.1 | 22 | 27358.49663 | A22 G22 | 27066.59778 | A32 G12 |
| | coronavirus | | | | | C12 T32 | | C22 T22 |
| nsp11 | Bovine | BCoV-LUN | AF391542.1 | 22 | 42606.00337 | A38 G32 | 42052.0608 | A52 G15 |
| | coronavirus | | | | | C15 T52 | | C32 T38 |
| RdRp | Bovine | Mebus | U00735.2 | 23 | 27358.49663 | A22 G22 | 27066.59778 | A32 G12 |
| | coronavirus | | | | | C12 T32 | | C22 T22 |
| nsp11 | Bovine | Mebus | U00735.2 | 23 | 42606.00337 | A38 G32 | 42052.0608 | A52 G15 |
| | coronavirus | | | | | C15 T52 | | C32 T38 |
| RdRp | Bovine | Quebec | AF220295.1 | 24 | 27358.49663 | A22 G22 | 27066.59778 | A32 G12 |
| | coronavirus | | | | | C12 T32 | | C22 T22 |
| nsp11 | Bovine | Quebec | AF220295.1 | 24 | 42591.0037 | A38 G32 | 42068.05572 | A51 G16 |
| | coronavirus | | | | | C16 T51 | | C32 T38 |
| RdRp | Bovine | Unknown | AF124985.1 | 25 | 27358.49663 | A22 G22 | 27066.59778 | A32 G12 |
| | coronavirus | | | | | C12 T32 | | C22 T22 |
| RdRp | Bovine | Unknown | NC_003045.1 | 26 | 27358.49663 | A22 G22 | 27066.59778 | A32 G12 |
| | coronavirus | | | | | C12 T32 | | C22 T22 |
| nsp11 | Bovine | Unknown | NC_003045.1 | 26 | 42606.00337 | A38 G32 | 42052.0608 | A52 G15 |
| | coronavirus | | | | | C15 T52 | | C32 T38 |
| RdRp | Canine | 1-71; | AF124986.1 | 27 | 27486.53139 | A24 G24 C8 | 26936.57252 | A32 G8 |
| | coronavirus | VR-809 | | | | T32 | | C24 T24 |
| RdRp | Canine | respiratory | AY150273.1 | 28 | 27343.49696 | A22 G22 | 27082.59269 | A31 G13 |
| | respiratory | | | | | C13 T31 | | C22 T22 |
| | coronavirus | | | | | | | |
| RdRp | Feline | UCD2 | AF124987.1 | 29 | 27472.52698 | A23 G25 | 26953.56268 | A30 G10 |
| | infectious | | | | | C10 T30 | | C25 T23 |
| | peritonitis | | | | | | | |
| | virus | | | | | | | |
| RdRp | Human coronavirus | 229E | NC_002645.1 | 30 | 27450.54396 | A25 G24 | 26975.54569 | A28 G11 |
| | 229E | | | | | C11 T28 | | C24 T25 |
| nsp11 | Human coronavirus | 229E | NC_002645.1 | 30 | 42462.96894 | A36 G30 | 42198.08098 | A51 G20 |
| | 229E | | | | | C20 T51 | | C30 T36 |
| RdRp | Human coronavirus | 229E | AF304460.1 | 31 | 27450.54396 | A25 G24 | 26975.54569 | A28 G11 |
| | 229E | | | | | C11 T28 | | C24 T25 |
| nsp11 | Human coronavirus | 229E | AF304460.1 | 31 | 42462.96894 | A36 G30 | 42198.08098 | A51 G20 |
| | 229E | | | | | C20 T51 | | C30 T36 |
| RdRp | Human coronavirus | 229E | X69721.1 | 32 | 27450.54396 | A25 G24 | 26975.54569 | A28 G11 |
| | 229E | | | | | C11 T28 | | C24 T25 |
| nsp11 | Human coronavirus | 229E | X69721.1 | 32 | 42462.96894 | A36 G30 | 42198.08098 | A51 G20 |
| | 229E | | | | | C20 T51 | | C30 T36 |
| RdRp | Human coronavirus | OC43 | AF124989.1 | 33 | 27328.4973 | A22 G22 | 27098.58761 | A30 G14 |
| | OC43 | | | | | C14 T30 | | C22 T22 |
| RdRp | Murine hepatitis | A59 | X51939.1 | 34 | 27344.49221 | A21 G23 | 27083.58794 | A30 G14 |
| | virus | | | | | C14 T30 | | C23 T21 |
| nsp11 | Murine hepatitis | A59 | X51939.1 | 34 | 42599.97755 | A34 G35 | 42064.05812 | A50 G18 |
| | virus | | | | | C18 T50 | | C35 T34 |
| RdRp | Murine hepatitis | JHM | M55148.1 | 35 | 27344.49221 | A21 G23 | 27083.58794 | A30 G14 |
| | virus | | | | | C14 T30 | | C23 T21 |
| nsp11 | Murine hepatitis | JHM | M55148.1 | 35 | 42529.97207 | A34 G34 | 42136.05409 | A48 G21 |
| | virus | | | | | C21 T48 | | C34 T34 |
| RdRp | Murine hepatitis | MHV-2 | AF201929.1 | 36 | 27344.49221 | A21 G23 | 27083.58794 | A30 G14 |
| | virus | | | | | C14 T30 | | C23 T21 |
| nsp11 | Murine hepatitis | MHV-2 | AF201929.1 | 36 | 42576.99929 | A37 G33 | 42085.04588 | A49 G18 |
| | virus | | | | | C18 T49 | | C33 T37 |
| RdRp | Murine hepatitis | MHV-A59 | NC_001846.1 | 37 | 27344.49221 | A21 G23 | 27083.58794 | A30 G14 |
| | virus | | | | | C14 T30 | | C23 T21 |
| nsp11 | Murine hepatitis | MHV-A59 | NC_001846.1 | 37 | 42599.97755 | A34 G35 | 42064.05812 | A50 G18 |
| | virus | | | | | C18 T50 | | C35 T34 |
| RdRp | Murine hepatitis | MHV-A59 | AF029248.1 | 38 | 27344.49221 | A21 G23 | 27083.58794 | A30 G14 |
| | virus | | | | | C14 T30 | | C23 T21 |
| nsp11 | Murine hepatitis | MHV-A59 | AF029248.1 | 38 | 42599.97755 | A34 G35 | 42064.05812 | A50 G18 |
| | virus | | | | | C18 T50 | | C35 T34 |
| RdRp | Murine hepatitis | ML-10 | AF208067.1 | 39 | 27344.49221 | A21 G23 | 27083.58794 | A30 G14 |
| | virus | | | | | C14 T30 | | C23 T21 |
| nsp11 | Murine hepatitis | ML-10 | AF208067.1 | 39 | 42599.97755 | A34 G35 | 42064.05812 | A50 G18 |
| | virus | | | | | C18 T50 | | C35 T34 |
| RdRp | Murine hepatitis | ML-11 | AF207902.1 | 40 | 27344.49221 | A21 G23 | 27083.58794 | A30 G14 |
| | virus | | | | | C14 T30 | | C23 T21 |
| nsp11 | Murine hepatitis | ML-11 | AF207902.1 | 40 | 42576.99929 | A37 G33 | 42085.04588 | A49 G18 |
| | virus | | | | | C18 T49 | | C33 T37 |
| RdRp | Murine hepatitis | Penn 97-1 | AF208066.1 | 41 | 27344.49221 | A21 G23 | 27083.58794 | A30 G14 |
| | virus | | | | | C14 T30 | | C23 T21 |
| nsp11 | Murine hepatitis | Penn 97-1 | AF208066.1 | 41 | 42576.99929 | A37 G33 | 42085.04588 | A49 G18 |
| | virus | | | | | C18 T49 | | C33 T37 |
| RdRp | Porcine epidemic | CV777 | AF353511.1 | 42 | 27392.51468 | A23 G23 | 27033.57498 | A30 G12 |
| | diarrhea virus | | | | | C12 T30 | | C23 T23 |
| nsp11 | Porcine epidemic | CV777 | AF353511.1 | 42 | 42459.90775 | A29 G33 | 42205.12316 | A54 G21 |
| | diarrhea virus | | | | | C21 T54 | | C33 T29 |
| RdRp | Porcine epidemic | CV777 | NC_003436.1 | 43 | 27392.51468 | A23 G23 | 27033.57498 | A30 G12 |
| | diarrhea virus | | | | | C12 T30 | | C23 T23 |
| nsp11 | Porcine epidemic | CV777 | NC_003436.1 | 43 | 42459.90775 | A29 G33 | 42205.12316 | A54 G21 |
| | diarrhea virus | | | | | C21 T54 | | C33 T29 |
| RdRp | Porcine | VR-741 | AF124988.1 | 44 | 27343.49696 | A22 G22 | 27082.59269 | A31 G13 |
| | hemagglutinating | | | | | C13 T31 | | C22 T22 |
| | encephalomyelitis | | | | | | | |
| | virus | | | | | | | |
| RdRp | Rat | 8190 | AF124990.1 | 45 | 27344.49221 | A21 G23 | 27083.58794 | A30 G14 |
| | sialodacryoadenitis | | | | | C14 T30 | | C23 T21 |
| | coronavirus | | | | | | | |
| RdRp | SARS | BJ01 | AY278488.1 | 46 | 27298.53569 | A27 G19 | 27125.56347 | A28 G14 |
| | coronavirus | | | | | C14 T28 | | C19 T27 |
| RdRp | SARS | BJ01 | AY278488.1 | 46 | 27298.53569 | A27 G19 | 27125.56347 | A28 G14 |
| | coronavirus | | | | | C14 T28 | | C19 T27 |
| nsp11 | SARS | BJ01 | AY278488.2 | 47 | 42519.96525 | A34 G33 | 42144.07041 | A50 G20 |
| | coronavirus | | | | | C20 T50 | | C33 T34 |
| nsp11 | SARS | BJ02 | AY278487.3 | 48 | 42519.96525 | A34 G33 | 42144.07041 | A50 G20 |
| | coronavirus | | | | | C20 T50 | | C33 T34 |
| RdRp | SARS | BJ02 | AY278487.1 | 49 | 27298.53569 | A27 G19 | 27125.56347 | A28 G14 |
| | coronavirus | | | | | C14 T28 | | C19 T27 |
| RdRp | SARS | BJ02 | AY278487.1 | 49 | 27298.53569 | A27 G19 | 27125.56347 | A28 G14 |
| | coronavirus | | | | | C14 T28 | | C19 T27 |
| RdRp | SARS | BJ03 | AY278490.1 | 50 | 27298.53569 | A27 G19 | 27125.56347 | A28 G14 |
| | coronavirus | | | | | C14 T28 | | C19 T27 |
| RdRp | SARS | BJ03 | AY278490.1 | 50 | 27298.53569 | A27 G19 | 27125.56347 | A28 G14 |
| | coronavirus | | | | | C14 T28 | | C19 T27 |
| nsp11 | SARS | BJ03 | AY278490.3 | 51 | 42519.96525 | A34 G33 | 42144.07041 | A50 G20 |
| | coronavirus | | | | | C20 T50 | | C33 T34 |
| nsp11 | SARS | BJ04 | AY279354.2 | 52 | 42519.96525 | A34 G33 | 42144.07041 | A50 G20 |
| | coronavirus | | | | | C20 T50 | | C33 T34 |
| RdRp | SARS | BJ04 | AY279354.1 | 53 | 27298.53569 | A27 G19 | 27125.56347 | A28 G14 |
| | coronavirus | | | | | C14 T28 | | C19 T27 |
| RdRp | SARS | BJ04 | AY279354.1 | 53 | 27298.53569 | A27 G19 | 27125.56347 | A28 G14 |
| | coronavirus | | | | | C14 T28 | | C19 T27 |
| RdRp | SARS | CUHK-Su10 | AY282752.1 | 54 | 27298.53569 | A27 G19 | 27125.56347 | A28 G14 |
| | coronavirus | | | | | C14 T28 | | C19 T27 |
| nsp11 | SARS | CUHK-Su10 | AY282752.1 | 54 | 42519.96525 | A34 G33 | 42144.07041 | A50 G20 |
| | coronavirus | | | | | C20 T50 | | C33 T34 |
| nsp11 | SARS | CUHK-W1 | AY278554.2 | 55 | 42519.96525 | A34 G33 | 42144.07041 | A50 G20 |
| | coronavirus | | | | | C20 T50 | | C33 T34 |
| RdRp | SARS | CUHK-W1 | AY278554.1 | 56 | 27298.53569 | A27 G19 | 27125.56347 | A28 G14 |
| | coronavirus | | | | | C14 T28 | | C19 T27 |
| RdRp | SARS | CUHK-W1 | AY278554.1 | 56 | 27298.53569 | A27 G19 | 27125.56347 | A28 G14 |
| | coronavirus | | | | | C14 T28 | | C19 T27 |
| RdRp | SARS | FRA | AY310120.1 | 57 | 27298.53569 | A27 G19 | 27125.56347 | A28 G14 |
| | coronavirus | | | | | C14 T28 | | C19 T27 |
| nsp11 | SARS | FRA | AY310120.1 | 57 | 42519.96525 | A34 G33 | 42144.07041 | A50 G20 |
| | coronavirus | | | | | C20 T50 | | C33 T34 |
| RdRp | SARS | Frankfurt | AY291315.1 | 58 | 27298.53569 | A27 G19 | 27125.56347 | A28 G14 |
| | coronavirus | 1 | | | | C14 T28 | | C19 T27 |
| nsp11 | SARS | Frankfurt | AY291315.1 | 58 | 42519.96525 | A34 G33 | 42144.07041 | A50 G20 |
| | coronavirus | 1 | | | | C20 T50 | | C33 T34 |
| nsp11 | SARS | GD01 | AY278489.2 | 59 | 42519.96525 | A34 G33 | 42144.07041 | A50 G20 |
| | coronavirus | | | | | C20 T50 | | C33 T34 |
| RdRp | SARS | GD01 | AY278489.1 | 60 | 27298.53569 | A27 G19 | 27125.56347 | A28 G14 |
| | coronavirus | | | | | C14 T28 | | C19 T27 |
| RdRp | SARS | GZ01 | AY278489.1 | 60 | 27298.53569 | A27 G19 | 27125.56347 | A28 G14 |
| | coronavirus | | | | | C14 T28 | | C19 T27 |
| RdRp | SARS | HKU-39849 | AY278491.2 | 61 | 27298.53569 | A27 G19 | 27125.56347 | A28 G14 |
| | coronavirus | | | | | C14 T28 | | C19 T27 |
| nsp11 | SARS | HKU-39849 | AY278491.2 | 61 | 42519.96525 | A34 G33 | 42144.07041 | A50 G20 |
| | coronavirus | | | | | C20 T50 | | C33 T34 |
| nsp11 | SARS | HSR 1 | AY323977.2 | 62 | 42519.96525 | A34 G33 | 42144.07041 | A50 G20 |
| | coronavirus | | | | | C20 T50 | | C33 T34 |
| RdRp | SARS | HSR 1 | AY323977.1 | 63 | 27298.53569 | A27 G19 | 27125.56347 | A28 G14 |
| | coronavirus | | | | | C14 T28 | | C19 T27 |
| RdRp | SARS | HSR 1 | AY323977.1 | 63 | 27298.53569 | A27 G19 | 27125.56347 | A28 G14 |
| | coronavirus | | | | | C14 T28 | | C19 T27 |
| RdRp | SARS | Shanghai | AY322206.1 | 64 | 27298.53569 | A27 G19 | 27125.56347 | A28 G14 |
| | coronavirus | LY | | | | C14 T28 | | C19 T27 |
| RdRp | SARS | Sin2500 | AY283794.1 | 65 | 27298.53569 | A27 G19 | 27125.56347 | A28 G14 |
| | coronavirus | | | | | C14 T28 | | C19 T27 |
| nsp11 | SARS | Sin2500 | AY283794.1 | 65 | 42519.96525 | A34 G33 | 42144.07041 | A50 G20 |
| | coronavirus | | | | | C20 T50 | | C33 T34 |
| RdRp | SARS | Sin2677 | AY283795.1 | 66 | 27298.53569 | A27 G19 | 27125.56347 | A28 G14 |
| | coronavirus | | | | | C14 T28 | | C19 T27 |
| nsp11 | SARS | Sin2677 | AY283795.1 | 66 | 42519.96525 | A34 G33 | 42144.07041 | A50 G20 |
| | coronavirus | | | | | C20 T50 | | C33 T34 |
| RdRp | SARS | Sin2679 | AY283796.1 | 67 | 27298.53569 | A27 G19 | 27125.56347 | A28 G14 |
| | coronavirus | | | | | C14 T28 | | C19 T27 |
| nsp11 | SARS | Sin2679 | AY283796.1 | 67 | 42519.96525 | A34 G33 | 42144.07041 | A50 G20 |
| | coronavirus | | | | | C20 T50 | | C33 T34 |
| RdRp | SARS | Sin2748 | AY283797.1 | 68 | 27298.53569 | A27 G19 | 27125.56347 | A28 G14 |
| | coronavirus | | | | | C14 T28 | | C19 T27 |
| nsp11 | SARS | Sin2748 | AY283797.1 | 68 | 42519.96525 | A34 G33 | 42144.07041 | A50 G20 |
| | coronavirus | | | | | C20 T50 | | C33 T34 |
| nsp11 | SARS | Shanghai | AY322198.1 | 69 | 42504.96559 | A34 G33 | 42160.06533 | A49 G21 |
| | coronavirus | QXC | | | | C21 T49 | | C33 T34 |
| RdRp | SARS | Sin2774 | AY283798.1 | 69 | 27298.53569 | A27 G19 | 27125.56347 | A28 G14 |
| | coronavirus | | | | | C14 T28 | | C19 T27 |
| nsp11 | SARS | Sin2774 | AY283798.1 | 69 | 42519.96525 | A34 G33 | 42144.07041 | A50 G20 |
| | coronavirus | | | | | C20 T50 | | C33 T34 |
| RdRp | SARS | Taiwan | AY338174.1 | 70 | 27298.53569 | A27 G19 | 27125.56347 | A28 G14 |
| | coronavirus | TC1 | | | | C14 T28 | | C19 T27 |
| nsp11 | SARS | Taiwan | AY338174.1 | 70 | 42519.96525 | A34 G33 | 42144.07041 | A50 G20 |
| | coronavirus | TC1 | | | | C20 T50 | | C33 T34 |
| RdRp | SARS | Taiwan | AY338175.1 | 71 | 27298.53569 | A27 G19 | 27125.56347 | A28 G14 |
| | coronavirus | TC2 | | | | C14 T28 | | C19 T27 |
| nsp11 | SARS | Taiwan | AY338175.1 | 71 | 42519.96525 | A34 G33 | 42144.07041 | A50 G20 |
| | coronavirus | TC2 | | | | C20 T50 | | C33 T34 |
| RdRp | SARS | Taiwan | AY348314.1 | 72 | 27298.53569 | A27 G19 | 27125.56347 | A28 G14 |
| | coronavirus | TC3 | | | | C14 T28 | | C19 T27 |
| nsp11 | SARS | Taiwan | AY348314.1 | 72 | 42519.96525 | A34 G33 | 42144.07041 | A50 G20 |
| | coronavirus | TC3 | | | | C20 T50 | | C33 T34 |
| RdRp | SARS | Tor2 | AY274119.1 | 73 | 27298.53569 | A27 G19 | 27125.56347 | A28 G14 |
| | coronavirus | | | | | C14 T28 | | C19 T27 |
| RdRp | SARS | Tor2 | AY274119.1 | 73 | 27298.53569 | A27 G19 | 27125.56347 | A28 G14 |
| | coronavirus | | | | | C14 T28 | | C19 T27 |
| RdRp | SARS | Tor2 | AY274119.2 | 74 | 27298.53569 | A27 G19 | 27125.56347 | A28 G14 |
| | coronavirus | | | | | C14 T28 | | C19 T27 |
| nsp11 | SARS | Tor2 | AY274119.3 | 75 | 42519.96525 | A34 G33 | 42144.07041 | A50 G20 |
| | coronavirus | | | | | C20 T50 | | C33 T34 |
| RdRp | SARS | TW1 | AY291451.1 | 76 | 27298.53569 | A27 G19 | 27125.56347 | A28 G14 |
| | coronavirus | | | | | C14 T28 | | C19 T27 |
| nsp11 | SARS | TW1 | AY291451.1 | 76 | 42519.96525 | A34 G33 | 42144.07041 | A50 G20 |
| | coronavirus | | | | | C20 T50 | | C33 T34 |
| RdRp | SARS | TWC | AY321118.1 | 77 | 27298.53569 | A27 G19 | 27125.56347 | A28 G14 |
| | coronavirus | | | | | C14 T28 | | C19 T27 |
| nsp11 | SARS | TWC | AY321118.1 | 77 | 42519.96525 | A34 G33 | 42144.07041 | A50 G20 |
| | coronavirus | | | | | C20 T50 | | C33 T34 |
| RdRp | SARS | TWC2 | AY362698.1 | 78 | 27298.53569 | A27 G19 | 27125.56347 | A28 G14 |
| | coronavirus | | | | | C14 T28 | | C19 T27 |
| nsp11 | SARS | TWC2 | AY362698.1 | 78 | 42519.96525 | A34 G33 | 42144.07041 | A50 G20 |
| | coronavirus | | | | | C20 T50 | | C33 T34 |
| RdRp | SARS | TWC3 | AY362699.1 | 79 | 27298.53569 | A27 G19 | 27125.56347 | A28 G14 |
| | coronavirus | | | | | C14 T28 | | C19 T27 |
| nsp11 | SARS | TWC3 | AY362699.1 | 79 | 42519.96525 | A34 G33 | 42144.07041 | A50 G20 |
| | coronavirus | | | | | C20 T50 | | C33 T34 |
| RdRp | SARS | TWH | AP006557.1 | 80 | 27298.53569 | A27 G19 | 27125.56347 | A28 G14 |
| | coronavirus | | | | | C14 T28 | | C19 T27 |
| nsp11 | SARS | TWH | AP006557.1 | 80 | 42519.96525 | A34 G33 | 42144.07041 | A50 G20 |
| | coronavirus | | | | | C20 T50 | | C33 T34 |
| RdRp | SARS | TWJ | AP006558.1 | 81 | 27298.53569 | A27 G19 | 27125.56347 | A28 G14 |
| | coronavirus | | | | | C14 T28 | | C19 T27 |
| nsp11 | SARS | TWJ | AP006558.1 | 81 | 42519.96525 | A34 G33 | 42144.07041 | A50 G20 |
| | coronavirus | | | | | C20 T50 | | C33 T34 |
| RdRp | SARS | TWK | AP006559.1 | 82 | 27298.53569 | A27 G19 | 27125.56347 | A28 G14 |
| | coronavirus | | | | | C14 T28 | | C19 T27 |
| nsp11 | SARS | TWK | AP006559.1 | 82 | 42519.96525 | A34 G33 | 42144.07041 | A50 G20 |
| | coronavirus | | | | | C20 T50 | | C33 T34 |
| RdRp | SARS | TWS | AP006560.1 | 83 | 27298.53569 | A27 G19 | 27125.56347 | A28 G14 |
| | coronavirus | | | | | C14 T28 | | C19 T27 |
| nsp11 | SARS | TWS | AP006560.1 | 83 | 42519.96525 | A34 G33 | 42144.07041 | A50 G20 |
| | coronavirus | | | | | C20 T50 | | C33 T34 |
| RdRp | SARS | TWY | AP006561.1 | 84 | 27298.53569 | A27 G19 | 27125.56347 | A28 G14 |
| | coronavirus | | | | | C14 T28 | | C19 T27 |
| nsp11 | SARS | TWY | AP006561.1 | 84 | 42519.96525 | A34 G33 | 42144.07041 | A50 G20 |
| | coronavirus | | | | | C20 T50 | | C33 T34 |
| RdRp | SARS | Unknown | NC_004718.3 | 85 | 27298.53569 | A27 G19 | 27125.56347 | A28 G14 |
| | coronavirus | | | | | C14 T28 | | C19 T27 |
| nsp11 | SARS | Unknown | NC_004718.3 | 85 | 42519.96525 | A34 G33 | 42144.07041 | A50 G20 |
| | coronavirus | | | | | C20 T50 | | C33 T34 |
| RdRp | SARS | Urbani | AY278741.1 | 86 | 27298.53569 | A27 G19 | 27125.56347 | A28 G14 |
| | coronavirus | | | | | C14 T28 | | C19 T27 |
| nsp11 | SARS | Urbani | AY278741.1 | 86 | 42519.96525 | A34 G33 | 42144.07041 | A50 G20 |
| | coronavirus | | | | | C20 T50 | | C33 T34 |
| RdRp | SARS | ZJ01 | AY297028.1 | 87 | 27298.53569 | A27 G19 | 27125.56347 | A28 G14 |
| | coronavirus | | | | | C14 T28 | | C19 T27 |
| nsp11 | SARS | ZJ01 | AY297028.1 | 87 | 42519.96525 | A34 G33 | 42144.07041 | A50 G20 |
| | coronavirus | | | | | C20 T50 | | C33 T34 |
| RdRp | SARS | ZMY 1 | AY351680.1 | 88 | 27298.53569 | A27 G19 | 27125.56347 | A28 G14 |
| | coronavirus | | | | | C14 T28 | | C19 T27 |
| nsp11 | SARS | ZMY 1 | AY351680.1 | 88 | 42519.96525 | A34 G33 | 42144.07041 | A50 G20 |
| | coronavirus | | | | | C20 T50 | | C33 T34 |
| RdRp | Transmissible | Purdue | AJ271965.2 | 89 | 27486.53139 | A24 G24 C8 | 26936.57252 | A32 G8 |
| | gastroenteritis | | | | | T32 | | C24 T24 |
| | virus | | | | | | | |
| nsp11 | Transmissible | Purdue | AJ271965.2 | 89 | 42465.93357 | A33 G30 | 42193.12585 | A56 G18 |
| | gastroenteritis | | | | | C18 T56 | | C30 T33 |
| | virus | | | | | | | |
| RdRp | Transmissible | Purdue | NC_002306.2 | 90 | 27486.53139 | A24 G24 C8 | 26936.57252 | A32 G8 |
| | gastroenteritis | | | | | T32 | | C24 T24 |
| | virus | | | | | | | |
| nsp11 | Transmissible | Purdue | NC_002306.2 | 90 | 42465.93357 | A33 G30 | 42193.12585 | A56 G18 |
| | gastroenteritis | | | | | C18 T56 | | C30 T33 |
| | virus | | | | | | | |
| RdRp | Transmissible | Purdue-115 | Z34093.1 | 91 | 27486.53139 | A24 G24 C8 | 26936.57252 | A32 G8 |
| | gastroenteritis | | | | | T32 | | C24 T24 |
| | virus | | | | | | | |
| nsp11 | Transmissible | Purdue-115 | Z34093.1 | 91 | 42465.93357 | A33 G30 | 42193.12585 | A56 G18 |
| | gastroenteritis | | | | | C18 T56 | | C30 T33 |
| | virus | | | | | | | |
| RdRp | Transmissible | Unknown | AJ011482.1 | 92 | 27486.53139 | A24 G24 C8 | 26936.57252 | A32 G8 |
| | gastroenteritis | | | | | T32 | | C24 T24 |
| | virus | | | | | | | |
| nsp11 | Transmissible | Unknown | AJ011482.1 | 92 | 42465.93357 | A33 G30 | 42193.12585 | A56 G18 |
| | gastroenteritis | | | | | C18 T56 | | C30 T33 |
| | virus | | | | | | | |
| RdRp | Transmissible | Unknown | AF124992.1 | 93 | 27486.53139 | A24 G24 C8 | 26936.57252 | A3 2 G8 |
| | gastroenteritis | | | | | T32 | | C24 T24 |
| | virus | | | | | | | |
| RdRp | Turkey | ATCCVR-911 | AF124991.1 | 94 | 27402.5215 | A23 G24 | 27025.55866 | A28 G13 |
| | coronavirus | | | | | C13 T28 | | C24 T23 |
| nsp11 | Canine | 1-71; VR-809 | Seq. In- | 95 | 42475.94038 | A33 G31 | 42185.10953 | A54 G19 |
| | coronavirus | | house | | | C19 T54 | | C31 T33 |
| RdRp | Canine | CCV-TN449; | Seq. In- | 96 | 27471.53173 | A24 G24 C9 | 26952.56743 | A31 G9 |
| | coronavirus | VR2068 | house | | | T31 | | C24 T24 |
| nsp11 | Canine | CCV-TN449; | Seq. In- | 96 | 42524.9581 | A34 G32 | 42136.09182 | A53 G18 |
| | coronavirus | VR-2068 | house | | | C18 T53 | | C32 T34 |
| RdRp | Feline | WSU 79-1683; | Seq. In- | 97 | 27471.53173 | A24 G24 C9 | 26952.56743 | A31 G9 |
| | infectious | VR-989 | house | | | T31 | | C24 T24 |
| | peritonitis | | | | | | | |
| | virus | | | | | | | |
| nsp11 | Feline | WSU 79-1683; | Seq. In- | 97 | 42490.94005 | A33 G31 | 42169.11462 | A55 G18 |
| | infectious | VR-989 | house | | | C18 T55 | | C31 T33 |
| | peritonitis | | | | | | | |
| | virus | | | | | | | |
| nsp11 | Feline | DF2; VR-2004 | Seq. In- | 98 | 42500.94687 | A33 G32 | 42161.0983 | A53 G19 |
| | infectious | | house | | | C19 T53 | | C32 T33 |
| | peritonitis | | | | | | | |
| | virus | | | | | | | |
| nsp11 | Human | OC43; | Seq. In- | 99 | 42580.99689 | A38 G31 | 42076.07203 | A53 G15 |
| | coronavirus | NHRC | house | | | C15 T53 | | C31 T38 |
| | OC43 | | | | | | | |
| nsp11 | Rat | 8190; | Seq. In- | 100 | | A34 G34 | | A49 G20 |
| | sialodacryoadenitis | VR1410 | house | | | C20 T49 | | C34 T34 |
| | coronavirus | | | | | | | |
| nsp11 | Murine | MHV1-VR261 | Seq. In- | 101 | 42602.00577 | A37 G34 | 42061.03465 | A48 G18 |
| | hepatitis | | house | | | C18 T48 | | C34 T37 |
| | virus | | | | | | | |

[0123] Entries with “Seq. In-house” indicate that a GenBank record did not exist at the time of assembly of the database of Table 3. To verify the experimentally measured base compositions, approximately 500 base pair (bp) regions flanking each target region used in this study were sequenced. The regions surrounding the target regions (615 bp for nsp11 and 454 bp for RdRp) were amplified using primers containing 5′ M13 sequencing tags. Methods of sequencing are well known to those with ordinary skill in the art.

### Example 5

### Characterization of Bioagent Identifying Amplicons for Coronaviruses

[0124] For broad-range detection of all coronaviruses, two PCR primer target regions in orf-1b, one in the RNA-dependent RNA polymerase (RdRp) and the other in Nsp11 were identified based on the analyses described in Examples 3 and 4. Locations of primers within these regions were optimized both for sensitivity and broad-range priming potential simultaneously by performing limiting dilutions of multiple, diverse coronaviruses. Analysis of the final primer pairs by ePCR of GenBank nucleotide database sequences showed that these primers would be expected to amplify all the known coronaviruses but no other viruses, bacteria, or human DNA. PCR products for each virus listed in Table 4 were generated, desalted, and analyzed by electrospray ionization Fourier transform ion cyclotron mass spectrometry (FTICR-MS) indicated in Examples 1 and 2. The spectral signals were algorithmically processed to yield base composition data. FIG. 8 is a schematic representation of electrospray ionization, strand separation, and the actual charge state distributions of the separated sense and antisense strands, and determination of molecular mass and base composition of the PCR products from the RdRp primer pair for the SARS coronavirus.

[0125] Due to the accuracy of FTICR-MS (mass measurement error±1 ppm), all detected masses could be unambiguously mapped to the base compositions of sense and antisense strands. The results from analysis of 14 coronavirus isolates are shown in Table 4.

TABLE 4
Experimentally Determined Molecular Masses and Base Compositions for a Selected Set of Coronaviruses

| | | | Experimentally | | Experimentally | |
|---|---|---|---|---|---|---|
| Corona- | | | Determined | Calculated Base | Determined | Calculated Base |
| virus | | | Monoisotopic | Compositions | Monoisotopic | Compositions |
| Species | Strain | Strand | Masses (RdRp) | (RdRp) | Masses (nsp11) | (nsp11) |
| Canine | 1-71 | Sense | 27486.514 | A24 G24 C8 T32 | 42475.955 | A33 G31 C19 T54 |
| | | Antisense | 26936.574 | A32 G8 C24 T24 | 42185.117 | A54 G19 C31 T33 |
| Canine | CCV-TN449 | Sense | 27471.510 | A24 G24 C9 T31 | 42474.899 | A34 G30 C18 T55 |
| | | Antisense | 26952.548 | A31 G9 C24 T24 | 42184.072 | A55 G18 C30 T34 |
| Feline | WSU | Sense | 27471.517 | A24 G24 C9 T31 | 42490.945 | A33 G31 C18 T55 |
| | 79-1683 | Antisense | 26952.556 | A31 G9 C24 T24 | 42169.118 | A55 G18 C31 T33 |
| Feline | DF2 | Sense | 27472.497 | A23 G25 C10 T30 | 42450.904 | A33 G30 C19 T55 |
| | | Antisense | 26953.536 | A30 G10 C25 T23 | 42209.081 | A55 G19 C30 T33 |
| Human | 229E | Sense | 27450.532 | A25 G24 C11 T28 | 42462.994 | A36 G30 C20 T51 |
| 229E | | Antisense | 26975.545 | A28 G11 C24 T25 | 42198.061 | A51 G20 C30 T36 |
| Human | 229E | Sense | 27450.506 | A25 G24 C11 T28 | 42462.930 | A36 G30 C20 T51 |
| 229E | | Antisense | 26975.512 | A28 G11 C24 T25 | 42198.040 | A51 G20 C30 T36 |
| Bovine | Calf | Sense | 27358.452 | A22 G22 C12 T32 | 42606.039 | A38 G32 C15 T52 |
| | Diarrheal | Antisense | 27066.586 | A32 G12 C22 T22 | 42052.897 | A52 G15 C32 T38 |
| | virus | | | | | |
| Human | OC43 | Sense | 27328.473 | A22 G22 C14 T30 | 42580.959 | A38 G31 C15 T53 |
| OC43 | | Antisense | 27098.562 | A30 G14 C22 T22 | 42076.028 | A53 G15 C31 T38 |
| Murine | MHV1 | Sense | 27344.491 | A21 G23 C14 T30 | 42602.022 | A37 G34 C18 T48 |
| Hepatiits | | Antisense | 27083.564 | A30 G14 C23 T21 | 42061.016 | A48 G18 C34 T37 |
| Virus | | | | | | |
| Murine | JHM- | Sense | 27344.497 | A21 G23 C14 T30 | 42529.960 | A34 G34 C21 T48 |
| Hepatitis | thermostable | Antisense | 27083.571 | A30 G14 C23 T21 | 42136.047 | A48 G21 C34 T34 |
| Virus | | | | | | |
| Murine | MHV-A59 | Sense | 27344.503 | A21 G23 C14 T30 | 42599.989 | A34 G35 C18 T50 |
| Hepatitis | | Antisense | 27083.572 | A30 G14 C23 T21 | 42064.089 | A50 G18 C35 T34 |
| Virus | | | | | | |
| Rat | 8190 | Sense | 27344.491 | A21 G23 C14 T30 | 42544.967 | A34 G34 C20 T49 |
| | | Antisense | 27083.567 | A30 G14 C23 T21 | 42120.041 | A49 G20 C34 T34 |
| SARS | TOR2 | Sense | 27298.518 | A27 G19 C14 T28 | 42519.906 | A34 G33 C20 T50 |
| | | Antisense | 27125.542 | A28 G14 C19 T27 | 42144.026 | A50 G20 C33 T34 |
| SARS | Urbani | Sense | 27298.518 | A27 G19 C14 T28 | 42519.906 | A34 G33 C20 T50 |
| | | Antisense | 27125.542 | A28 G14 C19 T27 | 42144.026 | A50 G20 C33 T34 |
| Avian | Egg- | Sense | 27396.544 | A24 G24 C14 T26 | 42530.984 | A33 G32 C17 T55 |
| Infectious | adapted | Antisense | 27032.524 | A26 G14 C24 T24 | 42129.100 | A55 G17 C32 T33 |
| Bronchitis | | | | | | |
| Virus | | | | | | |

[0126] For both primer regions, the measured signals agreed with compositions expected from the known coronavirus sequences in GenBank. Several of the isolates used in this study did not have a genome sequence record in GenBank. Nevertheless, bioagent identifying amplicons were obtained for all test viruses and their base compositions were experimentally determined. These experimentally determined base compositions were confirmed by sequencing. Thus the strategy described here enables identification of viruses without the need for prior knowledge of sequence.

[0127] To demonstrate the potential to detect multiple viruses in the same sample, as might occur during a co-infection, viral extracts from three human coronaviruses, HCoV-229E, HCoV-OC43, and SARS CoV, were pooled and the mixture was analyzed by the methods of the present invention. Signals from all three viruses were clearly detected and resolved in the mass spectrum (FIG. 9), demonstrating that co-infections of more than one coronavirus species could be identified. Dynamic range for reliable multispecies detections in this system is 10⁴(100:1 in each direction, data not shown). This example indicates that the etiology of a coronavirus infection can be resolved using the method of the present invention. Furthermore, the method of identification of coronaviruses can be combined with general methods of broad range and drill-down identification of bacteria to resolve a more complex etiology comprising viral and bacterial co-infections.

[0128] Shown in FIG. 10 is a spatial representation of the base compositions of five different coronaviruses for RdRp and nsp11 bioagent identifying amplicons. The G content of each base composition is represented by the tilt angle of the cone which indicates experimentally determined base composition. Calculated base compositions are indicated by the labeled spheres. FIG. 10 indicates that the experimentally determined base compositions generally match the calculated base compositions. One exception is the canine coronavirus analysis which indicated that a single T to C substitution (single nucleotide polymorphism) exists in the amplicon.

[0129] Characterization of a bioagent identifying amplicon does not require prior knowledge of sequence. This feature is exemplified for the bioagent identifying amplicons obtained with the nsp11 primer set. No sequence was available in the nsp11 region for three of the five viral species (FIPV, CcoV and HcoV OC43). Nevertheless, base compositions of the three bioagent identifying amplicons were determined which were well within the expected bounds of base compositions of coronavirus nsp11 bioagent identifying amplicons. Thus, had the identity of these three coronaviruses been unknown and if they had been tested with the same primer sets, they would have been identified as newly discovered coronaviruses.

### Example 6

### Quantitation of SARS Coronavirus by Internally Calibrated PCR

[0130] SARS coronavirus was handled in a P3 facility by investigators wearing forced air respirators. Equipment and supplies were decontaminated with 10% hypochlorite bleach solution for a minimum of 30 minutes or by immersion in 10% formalin for a minimum of 12 h and virus was handled in strict accordance with specific Scripps Research Institute policy. SARS CoV was cultured on sub confluent Vero-E6 cells at 37° C., 5% CO₂ in complete DMEM with final concentrations of 10% fetal bovine serum (Hyclone), 292 μg/mL L-Glutamine, 100 U/mL penicillin G sodium, 100 μg/mL streptomycin sulfate (Invitrogen), and 10 mM HEPES (Invitrogen). Virus-containing medium was collected during the peak of viral cytopathic effects, 48 h after inoculation with approximately 10 PFU/cell of SARS CoV from the second passage of stock virus. Infectious virus was titered by plaque assay. Monolayers of Vero-E6 cells were prepared at 70-80% confluence in tissue culture plates. Serial tenfold dilutions of virus were prepared in complete DMEM. Medium was aspirated from cells, replaced by 200 μL of inoculum, and cells were incubated at 37° C., 5% CO₂ for 1 hour. Cells were overlaid with 2-3 mL/well of 0.7% agarose, 1× DMEM overlay containing 2% fetal bovine serum. Agarose was allowed to solidify at room temperature then cells were incubated at 37° C., 5% CO₂ for 72 h. Plates were decontaminated by overnight formalin immersion, agarose plugs were removed, and cells were stained with 0.1% crystal violet to highlight viral plaques.

[0131] In order to demonstrate the detection of SARS coronavirus in a clinically relevant fluid, varying dilutions of the titered SARS virus were added to human serum. Serial tenfold dilutions (10⁰ to 10⁻¹⁵) of the SARS virus were prepared in complete DMEM. 50 μL of each dilution of the virus was added to 200 μL human serum, mixed well and treated with 0.75 mL of Trizol Reagent LS (Invitrogen, Carlsbad, Calif.) at room temperature for 10 minutes. Contents were then transferred to a clean tube, which was sterilized on the outside with 10% bleach and moved to a P2 facility. RNA was extracted following protocols described above. 100% of the isolated RNA was reverse transcribed. 1/40th of the RT reaction was used per PCR reaction. RT-PCR was carried out as described in Example 2.

[0132] To determine the relationship between PFU and copies of nucleic acid target, the SARS coronavirus stock solution was analyzed using internally calibrated PCR. Synthetic DNA templates with nucleic acid sequence identical in all respects to each PCR target region from SARS CoV with the exception of 5 base deletions internal to each amplicon were cloned into a pCR-Blunt vector (Invitrogen, Carlsbad, Calif.). The calibrant plasmid was quantitated using OD₂₆₀ measurements, serially diluted (10-fold dilutions), and mixed with a fixed amount of post-reverse transcriptase cDNA preparation of the virus stock and analyzed by competitive PCR and electrospray mass spectrometry. Each PCR reaction produced two sets of amplicons, one corresponding to the calibrant DNA and the other to the SARS cDNA. Since the primer targets on the synthetic DNA calibrant and the viral cDNA were almost identical, it was assumed that similar PCR efficiencies exist for amplification of the two products. Analysis of the ratios of peak heights of the resultant mass spectra of the synthetic DNA and viral cDNA for each dilution of the calibrant were used to determine the amounts of nucleic acid copies (as measured by calibrant molecules) present per PFU, post reverse transcriptase. A PFU (plate forming unit) is defined as a quantitative measure of the number of infectious virus particles in a given sample, since each infectious virus particle can give rise to a single clear plaque on infection of a continuous “lawn” of bacteria or a continuous sheet of cultured cells. Since all of the extracted RNA was used in the reverse transcriptase step to produce the viral cDNA, the approximate amount of nucleic acids associated with infectious virus particles in the original viral preparation was estimated.

[0133] To determine the relationship between PFU and copies of nucleic acid, the virus stock was analyzed using internally calibrated PCR. Synthetic DNA templates with nucleic acid sequence identical in all respects to each PCR target region from SARS CoV with the exception of 5 base deletions internal to each amplicon were cloned into a pCR-Blunt vector (Invitrogen, Carlsbad, Calif.). The calibrant plasmid was quantitated using OD260 measurements, serially diluted (10-fold dilutions), and mixed with a fixed amount of post-reverse transcriptase cDNA preparation of the virus stock and analyzed by competitive PCR and electrospray mass spectrometry. Each PCR reaction produced two sets of amplicons, one corresponding to the calibrant DNA and the other to the SARS cDNA. Since the amplicons generated from the synthetic DNA calibrant (calibrant amplicon) and the viral cDNA

1. A method of identification of one or more unknown coronaviruses in a sample comprising:
a) obtaining coronavirus RNA from said sample;
b) obtaining corresponding DNA from said RNA;
c) amplifying said DNA using one or more pairs of oligonucleotide primers that bind to conserved regions of a coronavirus genome, wherein said conserved regions flank a variable region of said coronavirus genome;
d) determining the molecular mass or base composition of the one or more amplification products obtained in step c); and
e) comparing said molecular mass or base composition with calculated or experimentally determined molecular masses or base compositions, wherein one or more matches identifies said unknown coronavirus.

2. The method of claim 1 wherein said conserved regions are about 80-100% identical among different coronaviruses.

3. The method of claim 1 wherein said variable region exhibits no greater than about 5% identity among different coronaviruses.

4. The method of claim 1 wherein said conserved and variable regions of a coronavirus genome are within genes encoding RNA-dependent RNA polymerase (RdRp) or nsp11.

5. The method of claim 1 wherein said coronavirus is Canine coronavirus, Feline coronavirus, Human coronavirus 229E, Human coronavirus OC43, Porcine epidemic diarrhea virus, Transmissible gastroenteritis virus, Bovine coronavirus, Murine hepatitis virus, Porcine hemagglutinating encephalomyelitis virus, Rat coronavirus, Turkey coronavirus, Avian infectious bronchitis virus, or SARS coronavirus.

6. The method of claim 1 wherein alignments of viral genome sequences are used to identify said conserved regions.

7. The method of claim 1 wherein said corresponding DNA is obtained from said RNA in a reverse transcriptase-catalyzed reaction.

8. The method of claim 1 wherein said amplification product is obtained using the polymerase chain reaction.

9. The method of claim 1 wherein said base composition is determined by measuring the molecular mass of both strands of said amplification product.

10. The method of claim 9 wherein determination of said base composition further comprises the process of strand matching.

11. A method of diagnosis of the etiology of a coronavirus infection comprising performing the method of claim 1 wherein said sample is a biological sample obtained from a human exhibiting symptoms of a coronavirus infection and the resulting identification of a specific coronavirus defines the etiology of said coronavirus infection.

12. The method of claim 11 wherein said etiology comprises infection by a plurality of coronavirus species.

13. The method of claim 12 wherein said plurality of coronavirus species comprises the SARS coronavirus.

14. The method of claim 12 wherein said etiology further comprises infection by a bacterial species, wherein said bacterial species is identified by determining the molecular mass of a bacterial bioagent identifying amplicon.

15. A method of tracking the spread of a specific coronavirus comprising:
obtaining a plurality of samples containing said specific coronavirus from a plurality of different locations; and
identifying said specific coronavirus in a subset of said plurality of samples using the method of claim 1, wherein the corresponding locations of the members of said subset indicate the spread of said specific coronavirus to said corresponding locations.

16. The method of claim 15 wherein said coronavirus is Canine coronavirus, Feline coronavirus, Human coronavirus 229E, Human coronavirus OC43, Porcine epidemic diarrhea virus, Transmissible gastroenteritis virus, Bovine coronavirus, Murine hepatitis virus, Porcine hemagglutinating encephalomyelitis virus, Rat coronavirus, Turkey coronavirus, Avian infectious bronchitis virus, or SARS coronavirus.

17. A primer pair wherein each member of the pair has at least 70% sequence identity with the sequence of the corresponding member of any one of the following intelligent primer pair sequences: SEQ ID NOs:5:6, 7:8, 9:8, 9:10, 11:8, 11:10 or 9:10.

18. The primer pair of claim 17 further comprising at least one nucleobase analog, wherein said nucleobase analog binds with increased affinity to its complementary nucleobase compared to the native nucleobase.

19. The primer pair of claim 18 wherein said nucleobase analog comprises 5-propynyluracil, 5-propynylcytosine, 2,6-diaminopurine, phenoxazine, or G-clamp.

20. A bioagent identifying amplicon for identification of a coronavirus comprising an isolated polynucleotide of about 45 to about 150 nucleobases in length produced by the process of amplification of nucleic acid from a coronavirus genome with a primer pair, wherein each primer of said pair is of a length of about 12 to about 35 nucleobases, wherein the bioagent identifying amplicon provides identifying information about the coronavirus.

21. The bioagent identifying amplicon of claim 20 wherein each member of said primer pair has at least 70% sequence identity with the sequence of the corresponding member of any one of the following intelligent primer pair sequences: SEQ ID NOs:5:6, 7:8, 9:8, 9:10, 11:8, 11:10 or 9:10.

22. The method of claim 20 wherein the sequence of said coronavirus genome is represented by any one of SEQ ID NOs:12, 13, 14, 15, 16, 17, 18, 19, 20, 21, 22, 23, 24, 25, 26, 27, 28, 29, 30, 31, 32, 33, 34, 35, 36, 37, 38, 39, 40, 41, 42, 43, 44, 45, 46, 47, 48, 49, 50, 51, 52, 53, 54, 55, 56, 57, 58, 59, 60, 61, 62, 63, 64, 65, 66, 67, 68, 69, 70, 71, 72, 73, 74, 75, 76, 77, 78, 79, 80, 81, 82, 83, 84, 85, 86, 87, 88, 89, 90, 91, 92, 93, 94, 95, 96, 97, 98, 99, 100 or 101.

23. A method for simultaneous determination of the identity and quantity of an unknown coronavirus in a sample comprising:
contacting said sample with a pair of primers and a known quantity of a calibration polynucleotide comprising a calibration sequence;
simultaneously amplifying nucleic acid from said unknown coronavirus with said pair of primers and amplifying nucleic acid from said calibration polynucleotide in said sample with said pair of primers to obtain a first amplification product comprising a bioagent identifying amplicon and a second amplification product comprising a calibration amplicon;
subjecting said sample to molecular mass analysis wherein the result of said mass analysis comprises molecular mass and abundance data for said bioagent identifying amplicon and said calibration amplicon; and
distinguishing said bioagent identifying amplicon from said calibration amplicon based on molecular mass, wherein the molecular mass of said bioagent identifying amplicon identifies said coronavirus and comparison of bioagent identifying amplicon abundance data and calibration amplicon abundance data indicates the quantity of coronavirus in said sample.

24. The method of claim 23 wherein said calibration sequence comprises the sequence of a chosen standard sequence of a bioagent identifying amplicon with the exception of a deletion of about 2-8 consecutive nucleotide residues of said standard sequence.

25. The method of claim 23 wherein said calibration sequence comprises the sequence of a chosen standard sequence of a bioagent identifying amplicon with the exception of an insertion of about 2-8 consecutive nucleotide residues of said standard sequence.

26. The method of claim 23 wherein said calibration sequence has at least 80% sequence identity with a chosen standard sequence of a bioagent identifying amplicon.

27. The method of claim 23 wherein said calibration sequence has at least 90% sequence identity with a chosen standard sequence of a bioagent identifying amplicon.

28. The method of claim 23 wherein said calibration sequence has at least 95% sequence identity with a chosen standard sequence of a bioagent identifying amplicon.

29. The method of claim 24 or claim 25 wherein said standard sequence is a segment of a gene sequence encoding RNA-dependent RNA polymerase (RdRp) or nsp11.

30. The method of claim 23 wherein said calibration polynucleotide resides on a plasmid.

31. The method of claim 23 wherein said molecular mass analysis comprises FTICR or MALDI-TOF mass spectrometry.

32. An isolated polynucleotide for determining the quantity of a bioagent in a sample comprising SEQ ID NO:102.

33. An isolated polynucleotide for determining the quantity of a bioagent in a sample comprising SEQ ID NO:103.

34. A plasmid vector comprising the calibration polynucleotide of SEQ ID NO:102 or SEQ ID NO:103.

35. A plasmid vector comprising the calibration polynucleotide of SEQ ID NO:104.

36. A kit comprising one or more pairs of primers wherein each member of each pair has at least 70% sequence identity with the sequence of the corresponding member of any one of the following intelligent primer pair sequences: SEQ ID NOs:5:6, 7:8, 9:8, 9:10, 11:8, 11:10 or 9:10.

37. The kit of claim 36 further comprising a reverse transcriptase and nucleotide triphosphates.

38. The kit of claim 36 further comprising a DNA polymerase and nucleotide triphosphates.

The application's sequence listing, which the Patent Office published only in electronic form, follows.

SEQUENCE LISTING (105 sequences)

SEQ ID NO: 1 - RNA, 90 nt, Bacillus anthracis
  misc_feature 20: n = A, U, C or G
gcgaagaaccuuaccaggunuugacauccucugacaacccuagagauagggcuucuccuucgggagcagagugacagguggugcaugguu

SEQ ID NO: 2 - RNA, 90 nt, Bacillus cereus
gcgaagaaccuuaccaggucuugacauccucugaaaacccuagagauagggcuucuccuucgggagcagagugacagguggugcaugguu

SEQ ID NO: 3 - RNA, 1388 nt, Artificial Sequence
  Synthetic consensus sequence
  misc_feature 1-7, 15, 22-24, 36-38, 41, 42,44, 56, 59-90, 93, 97, 98, 109,110, 112-116, 118-120, 123-131, 134,136, 138-144, 149-155, 161,162, 164-177, 182-209, 212-220, 222-225, 227, 230, 231, 235, 236,241, 245, 246, 253, 255-257, 260, 261-263, 267, 269, 270, 278, 279,281, 282, 284, 291, 294, 301, 306, 310, 329, 330, 335, 336-338,344, 345, 347, 350, 351, 355, 356, 357, 361,363, 364, 371, 372,373, 376, 379, 382-386, 388, 389, 394-396, 398-405, 408, 411-438,442, 443, 445-451, 453, 454, 458-460, 465, 469, 491, 495, 496, 499,504-506, 511, 512, 514, 524, 526-528, 530, 534, 537-544, 546-550,552, 556-562, 565, 569-578, 580-586, 589-595, 597, 601-606, 609,612-617, 621-624, 629, 633, 636, 639, 643, 645, 646, 648, 650, 654,658-660, 669-674, 678-683, 689, 691, 693-696, 704, 708, 712, 734,737, 738, 744, 746-754, 756-758, 760-782, 784-786, 791-793,796-800, 815, 816, 823-825, 834, 845, 848, 857, 859, 864, 869, 875,877, 878, 884, 886, 894-898, 903-917, 920, 922-948, 955, 961, 972,973, 978, 990, 1005-1013, 1015, 1017, 1019, 1021-1029, 1031, 1033,1037-1043, 1049-1051, 1053, 1054, 1057-1059, 1069, 1075, 1083, 1085,1089, 1094, 1096-1099, 1104, 1110, 1111, 1119-1123, 1127, 1128,1130, 1132, 1133, 1136, 1138, 1139-1141, 1143, 1144, 1146-1150,1154, 1157, 1159-1162, 1166-1170, 1172, 1173, 1176, 1181, 1183-1186,1195-1198, 1200, 1205, 1206, 1210, 1220-1222, 1227, 1229, 1231-1233,1244, 1249, 1266-1268, 1271, 1273, 1274, 1277-1285, 1288, 1289,1293-1304, 1306-1311, 1313-1322, 1324, 1326, 1329, 1330-1338, 1341,1345-1347, 1361, 1364, 1366-1368, 1372, 1373, 1375, 1378, 1388: n = A,U,C or G
nnnnnnnagaggacnggccagnnngaacgcggcggnnngcnnanacagcaagcgancgnnnnnnnnnnnnnnnnnnnnnnnnnnnnnnnnagnggcnnacggggagaanncnnnnnannnccnnnnnnnnnggnanannnnnnngaaannnnnnnaaaccnnannnnnnnnnnnnnnaaagnnnnnnnnnnnnnnnnnnnnnnnnnnnngannnnnnnnngnnnnanagnngggnnggaanggcnnaccaagncnnngannnnagcngnncgagaggnngnncngccacanggnacgaganacggnccanacccacgggaggcagcagnnggaannnncaaggnngnaanncgannnagcnannccgcggnnnganganggnnnnngnngaaannncnnnnnnnngangannnnnnnnnnnnnnnnnnnnnnnnnnnngacnnannnnnnnannaagnnncggcnaacncggccagcagccgcggaaacgnaggnngcnagcgnnncggannangggcgaaagngnnngnaggnggnnnnnnnngnnnnngnaaannnnnnngcnaacnnnnnnnnnncnnnnnnnacnnnnnnncngagnnnnnnagnggnnnnnngaannnnggagngggnaancgnagananngnangaanaccnnngcgaaggcnnnnnncggnnnnnnacgacncnannnncgaaagcngggnagcnaacaggaagaacccggagccangcnnaaacgngnnnnnnnnngnnngnnnnnnnnnnnnnnnnnnnnnnnannnaacgnnnaannnnnccgccggggagacgnncgcaagnnnaaaccaaangaagacggggnccngcacaagcngnggagnagggnaacgangnnacgcgnanaaccaccnnnnngacannnnnnnnnnnnnnnganannnnnnnnnnnnnnnnnnnnnnnnnnnacagggngcaggngcgcagccggnnggagnggggaagcccgnaacgagcgcaacccnnnnnnnnngncnancnnnnnnnnngngnaccnnnnnnnacgccnnngnnaannnggaggaaggnggggangacgcaancncagncccangnnnngggcncacacnncacaaggnnnnnacanngngnngcnannnngnnannnnnagcnaancnnnnaaannnnncnnagncggangnnnncgcaaccgnnnncngaagnnggancgcagaacgnnnacagnangnnncgggaaacgcncgggncgacacaccgcccgcannncangnnagnnnnnnnnnccnnaagnnnnnnnnnnnncnnnnnngnnnnnnnnnncnanggnnnnnnnnnngangggnnnaagcgaacaagganccnannngaanngnggnggacaccccn

SEQ ID NO: 4 - RNA, 2654 nt, Artificial Sequence
  Synthetic consensus sequence
  misc_feature 1-4, 8-12, 16, 18-22, 31, 35-40, 43, 47, 54, 56-62, 64, 65, 67-69,71, 72, 74-76, 79, 80, 83, 84, 86-93, 95-99, 101, 104-106, 108, 109,119, 125-142, 144-171, 173-175, 178-182, 186, 194, 198-202, 208, 214,215, 218-221, 224, 226-229, 233, 244-246, 248, 250, 251, 254, 256-280,282-284, 288-292, 295, 299-307,309-311, 314, 316, 318, 319, 322, 325-328,332-354, 358-360, 362-365, 367, 370, 372, 373, 375-378, 380, 381,385-387, 389-392, 398-403, 407, 414-420, 425, 429, 431, 433, 434, 439,443, 451, 458, 463, 464, 465, 466, 467, 469, 479, 482, 483, 492-496, 498,500, 503-505, 507-509, 512-525, 528, 529, 533, 537, 539, 540, 543-545,547, 549, 552-561, 564, 567, 570-578, 580, 583, 586, 589, 594, 599-601,604, 605, 607, 611-613, 616-620, 622-625, 630, 635, 637-639, 643, 646-648,651, 652, 657, 662-666, 670, 672-676, 682, 689-696, 703-708, 714, 715,718-720, 722, 725, 730, 731, 733, 736, 738, 742-744, 746, 747, 756, 757,763-766, 770-773, 776-791, 794,805-814, 817-829, 832, 833, 835-842, 847,852, 855-870, 872, 875, 876, 878, 879, 881-883, 885, 887, 889, 892-894,896-898, 900, 901, 903, 908, 913, 920, 922, 923, 925-927, 932, 936,939-946, 952, 956, 959, 962-967, 969, 970, 972, 976-978, 983, 999, 1001,1002, 1008, 1009, 1015, 1022, 1023, 1025, 1028-1034, 1039, 1042, 1043,1045, 1047, 1052, 1056-1063, 1069-1074, 1076-1097, 1102, 1103, 1109-1121,1126-1132, 1134, 1135, 1137-1143, 1147-1155, 1159, 1161, 1164, 1165, 1167,1168, 1170, 1174, 1178-1185, 1189, 1191, 1192, 1194-1198, 1200, 1204,1206-1208, 1210, 1215, 1218-1223, 1225, 1227-1229, 1231-1236, 1240,1245-1247, 1253, 1254, 1258, 1260, 1263,1265, 1267, 1268, 1271, 1272,1277, 1278, 1280-1282, 1285, 1286, 1291-1293, 1296-1316, 1321-1326,1328-1345, 1348-1455, 1457, 1458, 1464-1490, 1496, 1497, 1511, 1513-1516,1518, 1519, 1523, 1525, 1526, 1528, 1529, 1533, 1535-1537, 1539-1542,1545-1552, 1560, 1561, 1567-1571, 1576, 1581, 1583, 1588-1591, 1593-1633,1635-1638, 1640-1642, 1644-1646, 1648-1654, 1656, 1661, 1662, 1673, 1674,1676, 1677, 1680, 1683, 1684, 1687, 1691, 1692, 1695, 1699, 1702, 1703,1707, 1714, 1718, 1719, 1727, 1728, 1730-1738, 1740-1744, 1746-1756,1758-1760, 1767, 1768, 1770, 1779, 1780, 1789, 1790, 1820, 1828, 1831,1833, 1836, 1839-1846, 1851-1859, 1861, 1863, 1865, 1869-1871, 1873-1877,1879, 1886-1890, 1892, 1896-1900, 1915, 1916, 1918, 1920, 1924, 1925,1927-1932, 1934, 1936-1950, 1952, 1953, 1956, 1961, 1966, 1968, 1969,1970, 1973-1980, 1983, 1984, 1987-1993, 1998, 2000-2004, 2006, 2007, 2011,2014, 2016-2029, 2034-2044, 2046, 2048-2056, 2061, 2063-2065, 2067, 2068,2072, 2075, 2085, 2086, 2091, 2095, 2096, 2106, 2108, 2109, 2111,2116-2118, 2120, 2122-2125, 2128, 2129, 2132, 2133, 2136-2143, 2146, 2147,2150, 2151, 2153, 2155, 2159, 2160, 2161, 2164, 2165, 2169, 21702173-2176, 2179-2182, 2190-2192, 2199, 2200, 2203-2205, 2214, 2217-2222,2228, 2232, 2248, 2251, 2253, 2266, 2268-2271, 2280, 2283, 2291-2294, 2311,2313, 2324, 2327, 2328, 2339, 2340, 2349, 2350, 2355, 2358, 2362, 2370,2372, 2386, 2394, 2396, 2397, 2399, 2401, 2403, 2405-2407, 2410-2412,2415-2417, 2419-2421, 2423, 2424, 2426, 2442-2444, 2446, 2449, 2450, 2452,2454, 2459-2461, 2463, 2466-2468, 2473-2475, 2479, 2480, 2483, 2485, 2486,2491-2494, 2497-2500, 2505, 2506, 2512, 2520-2522, 2526, 2528-2530,2532-2535, 2539, 2540, 2543-2545, 2547, 2549-2568, 2571-2573, 2575,2576-2579, 2583, 2584, 2586-2589, 2591, 2597-2599, 2601-2603, 2605,2609-2612, 2614, 2615, 2617, 2618-2622, 2625-2627, 2630-2632, 2637-2640,2642-2647, 2649-2654: n = A,U,C or G
nnnnaagnnnnnaagngnnnnnggggagccnggcnnnnnnagncgangaaggangnnnnnnncnncnnnanncnnnggnnagnngnnnnnnnncnnnnnanccnnngnnccgaaggggnaacccnnnnnnnnnnnnnnnnnnannnnnnnnnnnnnnnnnnnnnnnnnnnngnnnacnnnnngaangaaacacnagannnnnaggaanagaaannaannnngancnnnngagnggcgagcgaannngnannagncnnnnnnnnnnnnnnnnnnnnnnnnnannngaannnnnggnaagnnnnnnnnnannnggnanannccngannnnaaannnnnnnnnnnnnnnnnnnnnnnagannncnnnncncgngnnannnngnngaannngnnnngaccannnnnnaagncaaaacnnnnnnngaccnaagngnannagacngganggaaaggngaaaagnacccnnnnnangggaggaaanagnnccgaaaccnnnnncnanaannngnnnagnnnnnnnnnnnnnnganngcgnccgnannagnnncngngannnnnnnnnngcnagnaannnnnnnnngnagncgnagngaaancgagnnnaanngngcgnnnagnnnnngnnnnagacncgaancnnnggancannnagnncaggngaagnnnnngaanannnnnggaggnccgaacnnnnnnnnggaaaannnnnnggagannggnnngnggngaaanncnaancnaacnnngnnaagcggccnncgaaannnnaggnnnngcnnnnnnnnnnnnnnnnggnggagagcacgnnnnnnnnnnggnnnnnnnnnnnnnacnnannnnnnnnaaacncgaanccnnnnnnnnnnnnnnnngnagnnanncnnngngngnaannncnnngnnanagggnaacancccagancnncnnnaaggncccnaannnnnnnnaagggnaaanganggnnnnnncnnanacannnaggangggcagaagcagccancnnaaaganngcgaanagccacnncnagnnnnnnngcgcngannanancgggncaannnnnnnnccgaannnnnngnnnnnnnnnnnnnnnnnnnnnnggagnngagcgnnnnnnnnnnnnngaagnnnnnnngnnannnnnnnggannnnnnnnnaggngnagnngnnanagancgannnnnnnnggananncnnnnncnccgnannncnaaggnccnnnnnnangnnncnnnnnngggnagcgnnnccaagnngagncnganangnnagnngaggnnannnggnnaaccnnnacnnnnnnnnnnnnnnnnnnnnngacgnnnnnngnnnnnnnnnnnnnnnnnnggnnnnnnnnnnnnnnnnnnnnnnnnnnnnnnnnnnnnnnnnnnnnnnnnnnnnnnnnnnnnnnnnnnnnnnnnnnnnnnnnnnnnnnnnnnnnnnnnnnnnnnnnnnnncnngaaaannnnnnnnnnnnnnnnnnnnnnnnnnncgaccnnaaaccgacacaggngnnnngnngagnanncnnaggngnnngnnnnaannnnnnnnaaggaacnngcaaannnnnccganccggnanaaggnnnncnnnnnnnnnnnnnnnnnnnnnnnnnnnnnnnnnnnnnnnnngnnnnannnannngnnnnnnncnacgannaaaaacacagnncnngcnaanncgnaagnngangaanggnngacnccgcccnggcnngaaggaanngnnnnnnnnngnnnnngnnnnnnnnnnnannnaagcccnngnaacggcggnngaacaaacnnccaaggagcgaaaccgcgggaagccgaccngcacgaanggngnaangannnnnnnncgccnnnnnnnnncncngngaannnannnnngnaagagcnnnnncncgcnnnnngacggaaagaccccnngnancacnnannnnnnangnnnnnnnnnnnnnnngnnagnaaggnggagncnnngannnnnnnncgnnagnnnnnnnggagncnnnnngnnaacnacncnnnnnnnnnnnnnncaacnnnnnnnnnnnancnnnnnnnnngacangnnngnngggnagnacggggcggnnccccnaaanngaacggaggngnncnaaggnnncnannnnggnnggnnacnnnnnnnnagnnaanngnanaagnnngcnnacgnnagnnnnacnnnncgagcagnnncgaaagnnggnnnaggaccggnggnnnnnnggaagngccncgccaacggaaaaagnacncnggggaaacaggcnannnncccaagagncanacgacggnnnngggcacccgagcggccncncaccggggcgnagnnggcccaagggnnggcgcgccnnaaagnggnacgngagcgggnanaacgcggagacagnggcccacngnngngngngnnngannngannngnnngnncnagacgagaggaccggnnngnacnnancncgggnnncnggnnngccannngcanngcngnnagcannnnggnnnngaaanngcgaangcacaagnnngaancnnncnnnnagannagnnncncnnnnnnnnnnnnnnnnnnnnagnnncnnnnnagannannnngngaaggnnngnnngnaagnnnngnnannnnnnagnnnacnnnacaannnncnnnnnncnnnnnn

SEQ ID NO: 5 - DNA, 26 bp, Artificial Sequence
  PCR PRimer
tgtttgttttggaattgtaatgttga

SEQ ID NO: 6 - DNA, 25 bp, Artificial Sequence
  PCR PRimer
tggaatgcatgcttattaacataca

SEQ ID NO: 7 - DNA, 21 bp, Artificial Sequence
  PCR PRimer
taagttttatggcgggtggga

SEQ ID NO: 8 - DNA, 21 bp, Artificial Sequence
  PCR PRimer
tttagggtagtcccaacccat

SEQ ID NO: 9 - DNA, 19 bp, Artificial Sequence
  PCR PRimer
taagttttatggcgggtgg

SEQ ID NO: 10 - DNA, 21 bp, Artificial Sequence
  PCR PRimer
tttaggatagtcccaacccat

SEQ ID NO: 11 - DNA, 19 bp, Artificial Sequence
  PCR PRimer
taagttttatggcggctgg

SEQ ID NO: 12 - DNA, 9081 bp, Coronavirus
acttaagatagatattaatatatatctattacactagccttgcgctagatttttaacttaacaaaacggacttaaatacctacagctggtcctcataggtgttccattgcagtgcactttagtgccctggatggcacctggccacctgtcaggtttttgttattaaaatcttattgttgctggtatcactgcttgttttgccgtgtctcactttatacatctgttgcttgggctacctagtgtccagcgtcctacgggcgtcgtggctggttcgagtgcgaggaacctctggttcatctagcggtaggcgggtgtgtggaagtagcacttcagacgtaccggttctgttgtgtgaaatacggggtcacctccccccacatacctctaagggcttttgagcctagcgttgggctacgttctcgcataaggtcggctatacgacgtttgtagggggtagtgccaaacaacccctgaggtgacaggttctggtggtgtttagtgagcagacatacaatagacagtgacaacatggcttcaagcctaaaacagggagtatctcccaaaccacgggatgtcattcttgtgtccaaagacatccctgaacaactttgtgacgctttgtttttctatacgtcacataaccctaaggattacgctgatgcttttgcagttaggcagaagtttgaccgtagtctccagactgggaaacagttcaaatttgaaactgtgtgtggtctcttcctcttgagggagttgacaaaataacacctggcgtcccagcaaaagttttaaaagccacttctaagttggcagatttagaagacatctttggtgtctctcctttagcgcggaagtaccgtgaattgttgaaaacagcgtgtcagtggtctcttactgtagaagcactggatgttcgtgcacaaactctcgatgaaatttttgaccccactgaaatactttggcttcaggtggctgcaaaaattcatgtttcatctatggcaatgcgcaggcttgttggagaagtaactgcaaaagtcatggatgctctgggctcaaacttgagtgctctttttcaaattgttaaacaacaaatagccagaatctttcaaaaggcactggctatttttgagaatcgagcctttgatgtttgtaataaggaatcagctggtatgtttcaaaatttgaagcgtaactgcgctagattccaggaactacgcgatactgaagatggaaatcttgagtatcttgattcttactttgtagttaaacaaaccactcctagtaattatgaacatgaaaaatcttgttacgaagacttaaagtcagaagtaacagctgaccatgacttctttgtgttcaataagaacatttacaatattagtaggcaacggcttactaaatatactatgatggacttctgctatgctttgagacatttcgacccaaaggattgtgaagttcttaaagaaatacttgtcacttatggttgtatagaagactatcaccctaagtggtttgaggagaataaggattggtacgacccaatagaaaactcaaaatattatgtcatgttggctaaaatgggacctattgtacgacgtgctttattgaatgctattgagttcggaaaccttatggttgaaaaaggttatgttggtgttattacactcgataaccaagaccttaatggcaaattttatgattttggtgattttcagaagacggcacctggtgctggtgttcctgtttttgatacgtattattcttacatgatgcccatcatagccatgacggatgctttagcacctgagaggtactttgaatatgatgtgcacaagggttataaatcttatgatctcctcaagtatgattatactgaggagaaacaagaattgtttcagaagtactttaagtactgggatcaagagtatcatcctaactgccgtgactgtagtgatgacaggtgtttgatacattgtgcaaacttcaatatcttgttttctacacttataccgcagacttctttcggtaatttgtgtagaaaagtttttgttgatggtgtaccatttatagctacttgtggctatcattctaaggaacttggtgttattatgaatcaagataacaccatgtctttttcaaaaatgggtttaagtcaactcatgcagtttgttggagatcctgctttgttagtgggaacatccaataatttagttgatcttagaacgtcttgttttagtgtttgtgcgttaacatctggtattactcatcaaacggtaaagccaggtcactttaacaaggatttctatgattttgcagagaaggctggtatgtttaaggagggttcgtctataccacttaaacattttttctatcctcaaactggtaatgctgctataaacgattatgattattatcgttataacaggcctaccatgtttgacatatgtcaacttctattttgtttagaagtgacttctaaatactttgagtgttatgaaggcggctgtataccagctagccaagttgtagttaacaacttagataagagtgcaggctatccatttaataagtttggaaaagcccgcctctattatgaaatgagtctagaggaacaggaccaactcttcgagattacgaagaagaatgtcctacccactataactcaaatgaatttaaaatatgccatatccgcgaaaaatagagcgcgtacagtggcaggtgtgtctatcctttctactatgactaataggcagtttcatcagaagattcttaagtctatagtcaacactagaaatgcttctgtagttattggaacaaccaagttttatggcggttgggacaacatgttgagaaacctgattcagggtgttgaagacccaattcttatgggttgggattatcctaagtgtgatagagcaatgcctaatttgttgcgtatagcagcatccttagtacttgctcgcaaacacactaactgttgtagttggtctgaacgcatttataggttgtataatgaatgcgcccaggtcttatctgaaactgtacttgctacaggtggtatttatgttaaacctggtggcactagcagtggtgatgctactactgcttatgcaaacagtgtttttaacataatacaagccacatctgctaatgttgcgcgtcttttgagtgttataacgcgtgatattgtctatgataatattaagagcttgcagtatgaattgtatcagcaggtctacaggcgagttaattttgacccagcctttgttgaaaagttttattcttacttatgtaagaatttttcgttgatgatcttgtctgacgacggtgttgtttgttacaacaacacattagccaaacaaggtcttgtagcagatatttctggttttagagaggttctctactatcagaataatgtttttatggctgattctaaatgttgggttgaaccagatttagaaaaaggcccacatgagttttgttcacaacacacaatgctagtggaggttgatggtgagcctaagtatttgccatacccagacccttcacgcattttgggtgcatgtgtttttgtagatgacgtggataagacagaacctgtggctgttatggagcgttatatagctcttgccatagatgcttatccactagtacatcatgaaaatgaagagtacaagaaggtattctttgttctccttgcatatatcagaaaactctatcaagagctttctcagaatatgcttatggactactcttttgtaatggatatagacaagggtagtaaattttgggaacaggagttctatgagaatatgtatagagctcctacgactttacaatcttgtggcgtttgtgtagtttgtaatagtcaaactatactacgctgcggtaattgtattcgtaaaccgtttttgtgttgtaagtgttgctatgaccacgtcatgcatacggaccacaaaaatgttttatctataaatccttatatttgctcacagctaggttgcggtgaagcagatgttactaaattgtacctcgggggtatgtcgtacttctgtggtaatcataaaccgaaattgtcaataccgttagtatctaatggtactgtttttggaatttacagggctaattgtgctggtagtgaaaatgttgatgattttaatcaactagctactactaattggtccattgtcgaaccttatattttagcaaatcgctgtagtgattcattgagacgttttgctgcagagacagtaaaagccacagaagaattacataagcaacaatttgctagtgcagaagtgcgagaagtattctcagatcgtgaattgattctatcatgggaaccaggaaaaaccaggccgccattgaatagaaattatgttttcacaggttatcactttacaagaactagtaaggtgcagcttggtgattttacatttgaaaaaggtgaaggtaaggatgttgtctattataaagcaacgtctactgctaaattgtctgtaggagacatttttgttttaacctcacacaatgttgtttctctcgtagcgccaacattgtgtccacaacaaaccttttctaggtttgtaaatttaagacctaatgtaatggtacctgaatgttttgtaaataacattccactttaccatttagtaggtaaacagaagcgtactacagtacaaggtcctcctggcagtggtaaatcccactttgctataggccttgcagtatactttagtagcgctcgtgttgtttttactgcatgttctcatgcagctgttgatgctttatgtgaaaaagcttttaagtttcttaaagttgatgattgcactcgtatagtaccccaaaggactactgtcgattgcttctcaaaatttaaagctaatgacacaggcaaaaagtacatttttagtactattaatgccttgccggaagttagttgtgatattcttttggttgacgaggttagtatgttgaccaattacgaattgtcctttattaatggtaagataaattaccaatatgttgtgtatgtaggtgatccggctcaattaccggcaccccgcactttacttaatggttcactttctccaaaggattataatgttgtcacaaaccttatggtttgtgttaaacctgatattttccttgcaaagtgttatcgttgtcctaaggaaattgtagacactgtgtctactcttgtttatgatggaaagtttattgcaaataacccagaatcacgtgagtgtttcaaggttatagttaataatggcaattctgatgtaggacatgaaagtggttcagcctacaacacaacacaattggaatttgtgaaagactttgtttgtcgcaataaacaatggcgggaagcaatatttatttcaccttacaatgctatgaaccagagagcttaccgtatgcttggacttaatgttcaaacagtagattcttctcaaggttcagagtatgattatgtcatcttctgtgttactgcagattcgcagcatgcactgaatattaatagatttaatgtggcgcttacaagagctaagcgtggtatactagttgtcatgcgccagcgtgatgaattgtattctgctcttaagtttacagagctagatagtgaaacaagtctgcaaggtacaggtttgtttaaaatttgcaacaaagaatttagtggtgtccatcctgcttatgcagtcacaactaaggctcttgctgcaacctataaagttaatgatgaacttgctgcacttgttaatgtggaagctggttcagaaataacatataaacatcttatttctctgttaggattcaagatgagtgttaatgttgaaggctgccacaacatgtttataacacgtgatgaggcaatccgcaatgtaagaggttgggtaggttttgatgtagaagcaacacatgcttgtggcactaacattggtactaacctgccttttcaagtaggtttctctactggtgcagactttgtagtcacgcctgagggacttgtagatacttcaataggcaataattttgagcctgtgaattctaaagcacctccaggtgaacaatttaaccacttgagagtgttatttaaaagtgctaaaccttggcatgttataagaccaaggatagtgcagatgttagcagacaatctatgcaacgtttcagattgtgtagtgtttgtcacatggtgtcatggcctagaactaactactttgcgctattttgttaaaataggcaaggaacaagtttgttcttgtggttctagagctacaacttttaattctcatactcaagcttatgcttgttggaagcattgtttgggttttgattttgtttataacccacttctagtggatattcaacagtggggttactcgggtaacctacagtttaatcatgatttgcactgtaatgtgcatggccacgctcatgtagcttctgttgacgctataatgactcgttgtcttgcaattaacaatgcattttgtcaagatgtcaactgggatttgacataccctcacattgcaaatgaggatgaagtcaattctagttgtagatatctacaacgcatgtatcttaatgcgtgtgttgatgctcttaaagttaatgttgtctatgatataggcaaccctaaaggtattaaatgtgttaggcgtggggatgttaattttagattctatgataagaatccaatagtacgcaacgtcaagcagtttgagtatgactataatcagcacaaagataagtttgctgatggtctttgtatgttttggaattgtaatgtggattgttatcctgataattccttggtttgtaggtatgacacacgaaatttgagtgtgtttaacctaccaggctgtaatggtggtagtctgtacgttaacaaacatgcattctacacacctaaatttgaccgcattagcttccgcaatttgaaagctatgccattctttttttatgactcatcgccttgtgaaaccattcaagtggatggagttgcgcaagaccttgtgtctctagctacgaaagactgtatcacaaagtgcaacattggtggcgctgtttgtaagaaacatgcccagatgtatgcagaatttgtgacttcttacaatgcagctgtcacagctggctttactttctgggtaactaataaacttaacccttataacttatggaaaagtttttcagctctccagtctatcgacaatattgcttataatatgtataagggtggtcattatgatgctattgctggagaaatgcccactgtcataactggagacaaagtttttgttattgatcaaggtgtagaaaaggcagtttttgttaatcaaacaactctacctacatctgtggcgtttgagctatatgcaaagagaaatattcgcacactgccaaacaaccgtattttgaaaggtttaggtgtagacgtaaccaatggatttgagcaataaaagccaagaagttaaatacacctccgcccaagtttgaaggtagcggtgttcctgataacgaaaacattaagccaagccagcaacatggatactggagacgccaagccaggtttaagccaggcaaaggtggaagaaaaccagtcccagatgcttggtacttttactatactggaacaggacctgccgctgacctgaactggggtgatactcaagatggtatagtgtgggttgctgctaagggtgctgatactaaatctagatccaatcagggtacaagagatcctgataagtttgaccaatacccactacgattctcggatggcggacctgatggtaatttccgttgggacttcattcccctgaaccgtggtaggagtggaagatcaacagcagcttcatcagcagcagctagtagagcaccatcacgtgaaggttcgcgtggtcgtagaagtgattctggagatgaccttattgctcgtgcagcaaagataatccaggatcagcagaaaaagggctctcgcattaccaaggcaaaggcagatgaaatggctcatcgccggtattgcaagcgcactatcccacctaattatagggttgatcaagtgtttggtccccgtactaaaggtaaggaggggaattttggtgatgacaagatgaatgaggaaggtattaaggatgggcgtgttacagcaatgctcaacctagtccctagcagccatgcttgtctttttggaagtagagtgacacccaaacttcaactagatgggcttcacttgagatttgaatttactactgtggtcccatgtgatgacccgcagtttgataattatgtgaaaatttgtgatcagtgtgtcgatggtgtaggaacgcgtccaaaagatgacgaaccaaaaccaaagtcacgctcaagttcaagacctgctacaagaggaaattctccagcgccaagacaacagcgcccaaagaaggagaaaaagctaaagaagcaggatgatgaagcagataaagcattgacctcagatgaggagaggaacaatgcacagctggaattttatgatgagcccaaggtaattaactggggggatgcagctctaggagagaatgaactttgagtaacataatggacctgttgtttcctggtacattttgttaaacactatttctgtgctttcctatcaattattacaggcattgattgtgattatgttcaatacttaagcttcttttggttgctttttgcttattgtattgttgctgtgctttttattgttgtgattctcattagtttgctttatcgtagaaattcaatagtaagagttaaggaagataggcatgtagcttgattacctacatgtctatcgccagggaaatgtctaatctgtctacttagtagcctggaaacgaacggtagacccttagattttaatttagtttaatttttagtttagtttaagttagtttagagtaggtataaagatgccagtgccggggccacgcggagtacgatcgagggtacagcactaggacgcccattaggggaagagctaaattttagtttaagttaagtttaattggctaagtatagttaaaatttataggctagtatagagttagagca

SEQ ID NO: 13 - DNA, 6127 bp, Coronavirus
acttaagatagatattaatatatatctattacactagccttgcgctagatttttaacttaacaaaacggacttaaatacctacagctggtcctcataggtgttccattgcagtgcactttagtgccctggatggcacctggccacctgtcaggtttttgttattaaaatcttattgttgctggtatcactgcttgttttgccgtgtctcactttatacatctgttgcttgggctacctagtgtccagcgtcctacgggcgtcgtggctggttcgagtgcgaggaacctctggttcatctagcggtaggcgggtgtgtggaagtagcacttcagacgtaccggttctgttgtgtgaaatacggggtcacctccccccacatacctctaagggcttttgagcctagcgttgggctacgttctcgcataaggtcggctatacgacgtttgtagggggtagtgccaaacaacccctgaggtgacaggttctggtggtgtttagtgagcagacatacaatagacagtgacaacatggcttcaagcctaaaacagggagtatctcccaaaccacgggatgtcattcttgtgtccaaagacatccctgaacaactttgtgacgctttgtttttctatacgtcacataaccctaaggattacgctgatgcttttgcagttaggcagaagtttgaccgtagtctccagactgggaaacagttcaaatttgaaactgtgtgtggtctcttcctcttgagggagttgacaaaataacacctggcgtcccagcaaaagttttaaaagccacttctaagttggcagatttagaagacatctttggtgtctctcctttagcgcggaagtaccgtgaattgttgaaaacagcgtgtcagtggtctcttactgtagaagcactggatgttcgtgcacaaactctcgatgaaatttttgaccccactgaaatactttggcttcaggtggctgcaaaaattcatgtttcatctatggcaatgcgcaggcttgttggagaagtaactgcaaaagtcatggatgctctgggctcaaacttgagtgctctttttcaaattgttaaacaacaaatagccagaatctttcaaaaggcactggctatttttgagaatcgagcctttgatgtttgtaataaggaatcagctggtatgtttcaaaatttgaagcgtaactgcgctagattccaggaactacgcgatactgaagatggaaatcttgagtatcttgattcttactttgtagttaaacaaaccactcctagtaattatgaacatgaaaaatcttgttacgaagacttaaagtcagaagtaacagctgaccatgacttctttgtgttcaataagaacatttacaatattagtaggcaacggcttactaaatatactatgatggacttctgctatgctttgagacatttcgacccaaaggattgtgaagttcttaaagaaatacttgtcacttatggttgtatagaagactatcaccctaagtggtttgaggagaataaggattggtacgacccaatagaaaactcaaaatattatgtcatgttggctaaaatgggacctattgtacgacgtgctttattgaatgctattgagttcggaaaccttatggttgaaaaaggttatgttggtgttattacactcgataaccaagaccttaatggcaaattttatgattttggtgattttcagaagacggcacctggtgctggtgttcctgtttttgatacgtattattcttacatgatgcccatcatagccatgacggatgctttagcacctgagaggtactttgaatatgatgtgcacaagggttataaatcttatgatctcctcaagtatgattatactgaggagaaacaagaattgtttcagaagtactttaagtactgggatcaagagtatcatcctaactgccgtgactgtagtgatgacaggtgtttgatacattgtgcaaacttcaatatcttgttttctacacttataccgcagacttctttcggtaatttgtgtagaaaagtttttgttgatggtgtaccatttatagctacttgtggctatcattctaaggaacttggtgttattatgaatcaagataacaccatgtctttttcaaaaatgggtttaagtcaactcatgcagtttgttggagatcctgctttgttagtgggaacatccaataatttagttgatcttagaacgtcttgttttagtgtttgtgcgttaacatctggtattactcatcaaacggtaaagccaggtcactttaacaaggatttctatgattttgcagagaaggctggtatgtttaaggagggttcgtctataccacttaaacattttttctatcctcaaactggtaatgctgctataaacgattatgattattatcgttataacaggcctaccatgtttgacatatgtcaacttctattttgtttagaagtgacttctaaatactttgagtgttatgaaggcggctgtataccagctagccaagttgtagttaacaacttagataagagtgcaggctatccatttaataagtttggaaaagcccgcctctattatgaaatgagtctagaggaacaggaccaactcttcgagattacgaagaagaatgtcctacccactataactcaaatgaatttaaaatatgccatatccgcgaaaaatagagcgcgtacagtggcaggtgtgtctatcctttctactatgactaataggcagtttcatcagaagattcttaagtctatagtcaacactagaaatgcttctgtagttattggaacaaccaagttttatggcggttgggacaacatgttgagaaacctgattcagggtgttgaagacccaattcttatgggttgggattatcctaagtgtgatagagcaatgcctaatttgttgcgtatagcagcatccttagtacttgctcgcaaacacactaactgttgtagttggtctgaacgcatttataggttgtataatgaatgcgcccaggtcttatctgaaactgtacttgctacaggtggtatttatgttaaacctggtggcactagcagtggtgatgctactactgcttatgcaaacagtgtttttaacataatacaagccacatctgctaatgttgcgcgtcttttgagtgttataacgcgtgatattgtctatgataatattaagagcttgcagtatgaattgtatcagcaggtctacaggcgagttaattttgacccagcctttgttgaaaagttttattcttacttatgtaagaatttttcgttgatgatcttgtctgacgacggtgttgtttgttacaacaacacattagccaaacaaggtcttgtagcagatatttctggttttagagaggttctctactatcagaataatgtttttatggctgattctaaatgttgggttgaaccagatttagaaaaaggcccacatgagttttgttcacaacacacaatgctagtggaggttgatggtgagcctaagtatttgccatacccagacccttcacgcattttgggtgcatgtgtttttgtagatgacgtggataagacagaacctgtggctgttatggagcgttatatagctcttgccatagatgcttatccactagtacatcatgaaaatgaagagtacaagaaggtattctttgttctccttgcatatatcagaaaactctatcaagagctttctcagaatatgcttatggactactcttttgtaatggatatagacaagggtagtaaattttgggaacaggagttctatgagaatatgtatagagctcctacgactttacaatcttgtggcgtttgtgtagtttgtaatagtcaaactatactacgctgcggtaattgtattcgtaaaccgtttttgtgttgtaagtgttgctatgaccacgtcatgcattctacacacctaaatttgaccgcattagcttccgcaatttgaaagctatgccattctttttttatgactcatcgccttgtgaaaccattcaagtggatggagttgcgcaagaccttgtgtctctagctacgaaagactgtatcacaaagtgcaacattggtggcgctgtttgtaagaaacatgcccagatgtatgcagaatttgtgacttcttacaatgcagctgtcacagctggctttactttctgggtaactaataaacttaacccttataacttatggaaaagtttttcagctctccagtctatcgacaatattgcttataatatgtataagggtggtcattatgatgctattgctggagaaatgcccactgtcataactggagacaaagtttttgttattgatcaaggtgtagaaaaggcagtttttgttaatcaaacaactctacctacatctgtggcgtttgagctatatgcaaagagaaatattcgcacactgccaaacaaccgtattttgaaaggtttaggtgtagacgtaaccaatggatttgagcaataaaagccaagaagttaaatacacctccgcccaagtttgaaggtagcggtgttcctgataacgaaaacattaagccaagccagcaacatggatactggagacgccaagccaggtttaagccaggcaaaggtggaagaaaaccagtcccagatgcttggtacttttactatactggaacaggacctgccgctgacctgaactggggtgatactcaagatggtatagtgtgggttgctgctaagggtgctgatactaaatctagatccaatcagggtacaagagatcctgataagtttgaccaatacccactacgattctcggatggcggacctgatggtaatttccgttgggacttcattcccctgaaccgtggtaggagtggaagatcaacagcagcttcatcagcagcagctagtagagcaccatcacgtgaaggttcgcgtggtcgtagaagtgattctggagatgaccttattgctcgtgcagcaaagataatccaggatcagcagaaaaagggctctcgcattaccaaggcaaaggcagatgaaatggctcatcgccggtattgcaagcgcactatcccacctaattatagggttgatcaagtgtttggtccccgtactaaaggtaaggaggggaattttggtgatgacaagatgaatgaggaaggtattaaggatgggcgtgttacagcaatgctcaacctagtccctagcagccatgcttgtctttttggaagtagagtgacacccaaacttcaactagatgggcttcacttgagatttgaatttactactgtggtcccatgtgatgacccgcagtttgataattatgtgaaaatttgtgatcagtgtgtcgatggtgtaggaacgcgtccaaaagatgacgaaccaaaaccaaagtcacgctcaagttcaagacctgctacaagaggaaattctccagcgccaagacaacagcgcccaaagaaggagaaaaagctaaagaagcaggatgatgaagcagataaagcattgacctcagatgaggagaggaacaatgcacagctggaattttatgatgagcccaaggtaattaactggggggatgcagctctaggagagaatgaactttgagtaacataatggacctgttgtttcctggtacattttgttaaacactatttctgtgctttcctatcaattattacaggcattgattgtgattatgttcaatacttaagcttcttttggttgctttttgcttattgtattgttgctgtgctttttattgttgtgattctcattagtttgctttatcgtagaaattcaatagtaagagttaaggaagataggcatgtagcttgattacctacatgtctatcgccagggaaatgtctaatctgtctacttagtagcctggaaacgaacggtagacccttagattttaatttagtttaatttttagtttagtttaagttagtttagagtaggtataaagatgccagtgccggggccacgcggagtacgatcgagggtacagcactaggacgcccattaggggaagagctaaattttagtttaagttaagtttaattggctaagtatagttaaaatttataggctagtatagagttagagc

SEQ ID NO: 14 - DNA, 27608 bp, Coronavirus
acttaagatagatattaatatatatctattacactagccttgcgctagatttttaacttaacaaaacggacttaaatacctacagctggtcctcataggtgttccattgcagtgcactttagtgccctggatggcacctggccacctgtcaggtttttgttattaaaatcttattgttgctggtatcactgcttgttttgccgtgtctcactttatacatctgttgcttgggctacctagtgtccagcgtcctacgggcgtcgtggctggttcgagtgcgaggaacctctggttcatctagcggtaggcgggtgtgtggaagtagcacttcagacgtaccggttctgttgtgtgaaatacggggtcacctccccccacatacctctaagggcttttgagcctagcgttgggctacgttctcgcataaggtcggctatacgacgtttgtagggggtagtgccaaacaacccctgaggtgacaggttctggtggtgtttagtgagcagacatacaatagacagtgacaacatggcttcaagcctaaaacagggagtatctcccaaaccacgggatgtcattcttgtgtccaaagacatccctgaacaactttgtgacgctttgtttttctatacgtcacataaccctaaggattacgctgatgcttttgcagttaggcagaagtttgaccgtagtctccagactgggaaacagttcaaatttgaaactgtgtgtggtctcttcctcttgaagggagttgacaaaataacacctggcgtcccagcaaaagttttaaaagccacttctaagttggcagatttagaagacatctttggtgtctctcctttagcgcggaagtaccgtgaattgttgaaaacagcgtgtcagtggtctcttactgtagaagcactggatgttcgtgcacaaactctcgatgaaatttttgaccccactgaaatactttggcttcaggtggctgcaaaaattcatgtttcatctatggcaatgcgcaggcttgttggagaagtaactgcaaaagtcatggatgctctgggctcaaacttgagtgctctttttcaaattgttaaacaacaaatagccagaatctttcaaaaggcactggctatttttgagaatgtgaatgaattaccacagcgtattgcagcacttaagatggcttttgccaagtgtgctaggtcaattactgttgtggttgttgaaagaactctagttgttaaagagttcgcaggaacttgtcttgcaagcattaatggtgctgtcgcaaaattctttgaagagttgccaaacggcttcatgggttctaagattttcacaacacttgccttctttaaagaggcagctgtgagagttgtggagaacataccaaatgcaccgagaggtactaagggatttgaagttgttggcaatgccaaaggcacacaggtagttgtgcgcggcatgcgaaatgacttaacattgcttgaccaaaaagctgatattcctgttgaaccagaaggttggtctgcaattttggatggacatctttgctatgtctttaggagtggtgatcgcttttatgctgcacctctttcaggaaattttgctttgagtgatgttcattgctgtgagcgtgtagtctgtctatctgatggtgtaacaccggagataaatgatggactcattctagctgcaatctactcttcttttagtgtctctgagcttgtaacagctcttaaaaagggtgaaccattcaagttcttgggccataaattcgtgtatgcgaaggatgcagcagtgtcttttactttagcgaaggctgccactattgcagatgtcttgaggctgtttcaatcagctcgtgtgatagcagaagatgtttggtcttcatttactgaaaagtcttttgaattctggaagcttgcatatggaaaagtgcgcaaccttgaagaatttgtgaagacctatgtttgtaaggctcaaatgtcgattgtgattctagcagcagtgcttggagaggacatttggcatcttgtctcacaagtcatctataaattaggtgttctttttactaaagtcgttgacttttgtgacaaacactggaaaggtttttgtgtacagttgaaaagagctaagctcattgtcaccgaaaccttctgtgttttaaaaggagttgcacagcattgttttcaactgctgctagatgcaatacactctttgtacaagagttttaagaagtgtgcacttggtagaatccatggagatttgctcttctggaaaggaggtgtgcataaaattgttcaagatggcgatgaaatatggtttgacgccattgatagtgttgatgttgaagatctgggtgttgttcaggaaaaatcgattgattttgaggtttgcgatgacgtgacacttccagaaaaccaacctggtcatatggttcaaatagaggatgatggtaagaactacatgttcttccgttttaaaaaggatgagaacatttattatacaccaatgtctcaacttggtgctattaatgtggtttgcaaagcaggcggtaagactgtcacctttggagaaactacagtacaagagataccaccacctgatgtcgtgcctattaaggttagcatagaatgttgtggtgaaccatggaatacgatcttcaagaaggcttataaagagcctatagaagtagatacagacctcacagtagaacaattgctctctgtgatctatgagaaaatgtgtgacgaccttaaattgtttccagaggcaccagagcctccaccatttgagaatgtcgcacttgttgataagaacggtaaagatttggattgtataaaatcttgccatttgatctatcgtgactatgagagcgatgatgacatcgaggaggaagatgctgaggagtgtgacacagactcaggtgaagctgaggagtgtgacactaattcagaatgtgaagaagaggatgaggatactaaagtgttggctcttatacaagacccggcaagtattaaataccctctgcctcttgatgaagattatagcgtctataatggatgtattgtacacaaggacgctcttgatgttgtgaatttaccatctggtgaagaaacttttgttgtcaataactgttttgagggagctgttaaaccacttccacagaaggtagttgatgttcttggtgactggggagaggctgttgatgcgcaagaacaactgtgtcaacaagagcctctgcaacatacctttgaagaaccagtcgaaaattctactggtagttctaagacaatgactgaacaagtcgttgtagaagatcaagaactacctgttgttgaacaagatcaggatgtagttgtttatacacctacagatcttgaagttgcaaaagaaacagcagaagaggttgatgagtttattctcatttttgctgttcctaaagaagaagttgtgtcccagaaagatggggcacagattaaacaagagcctattcaagttgttaaaccacaacgtgagaagaaggctaaaaagttcaaagttaaaccagccacatgtgagaaacctaaatttttggagtataaaacatgtgtgggtgatttgactgttgtaattgccaaagcattggatgagtttaaagagttctgcattgtaaatgctgcaaatgagcatatgactcatggtagtggcgttgcaaaggcaattgcagacttttgtggactggattttgttgaatattgtgaggactatgttaagaaacatgggccacaacagagacttgttacaccttcgtttgtcaaaggcattcaatgtgtgaataatgttgtaggaccccgccatggagacaacaacttgcatgagaagcttgttgctgcctacaagaatgtgcttgtagatggcgtagtcaattatgttgtgccagttctttcattaggaatttttggtgtagattttaaaatgtcaatagacgcaatgcgtgaagcttttgaaggttgcaccatacgcgttcttttgttttctctgagccaagaacacatcgattatttcgatgtaacttgcaaacagaagacaatttatcttacggaggatggtgttaaataccgctccattgttctaaaacctggtgactcattgggtcaatttggacaggtttatgctaaaaacaagatagtttttacagccgatgatgttgaggacaaagaaattctctacgtccccacgactgataaaagcattcttgaatactatggtttagatgcgcaaaagtatgtaatatatttgcaaacgcttgcgcagaaatggaatgtccaatatagggacaattttcttatactagagtggcgcgatggaaattgttggattagttcagcaatagttctccttcaagctgctaaaattaggtttaaaggttttctaacagaagcgtgggctaaactgttaggtggagatcctacagactttgttgcctggtgttatgcaagttgtactgctaaagtaggtgatttctcagatgctaattggcttttagcgaatttagcagaacattttgacgcagattacacaaatgcgtttcttaagaagcgcgtttcgtgtaactgtggtattaagagctatgagcttagaggccttgaagcttgtattcagccagttcgggcaactaatctgctacattttaagacgcaatattcaaattgcccaacctgtggcgcaaataatacggatgaagtaatagaagcttcgttaccgtacttattgctttttgctactgatggtcctgctacagttgattgtgatgaagatgctgtggggactgtcgtgtttgttggttctactaatagtggccattgttatacacaagctgcagggcaagcttttgataatcttgctaaagatagaaaatttggaaagaagtcgccttacattactgcaatgtatacgcgattcgcttttaagaatgaaacctctttgcctgttgctaaacagagcaagggtaagtctaagtcggtaaaggaagatgtttctaaccttgctactagttctaaggccagttttgataatcttactgacttcgaacagtggtatgatagtaacatctatgaaagtcttaaagtgcaggaatcacctgataactttgataaatatgtgtcattcacaacaaaggaagattctaagttgccattgacacttaaggttagaggtattaaatcagttgttgactttagatcgaaggatggttttatttataagttaacacctgatactgatgaaaattcaaaagcaccagtctactacccagtcttggacgctattagtcttaaggcaatatgggtggaaggtaatgctaactttgttgttggtcatccaaattattatagtaagtctcttcatattcctactttttgggaaaatgctgagaattttgttaaaatgggtgataaaattggtggtgtaactatgggactttggcgtgcagaacaccttaataaacctaatttggagagaattttcaacattgctaagaaagccattgttggatctagtgttgttactacacaatgcggtaaattaataggtaaagcagctacattcattgctgataaagtaggtggtggtgtagttcgcaatattacagatagcattaagggtctttgtggaattacacgagggcattttgaaagaaaaatgtctccacaattcctaaagacgcttatgttctttttattctatttcttgaaggctagtgttaagagtgttgtcgctagctataagaccgtgttatgtaaggtggtacttgctactttacttatagtttggtttgtctacacaagtaacccagtaatgtttacaggaatacgtgtgttagattttctattcgagggttctttgtgtggtccttataaagactatggtaaagattcttttgatgtgttacgatattgtgcagatgattttatttgtcgtgtgtgtttacatgacaaagattcacttcatttgtacaaacacgcttatagtgtagagcaggtctataaagatgcagcttctggttttatttttaattggaattggctttatttggtctttctaatattatttgttaaaccagtggcaggttttgttattatttgctattgtgttaagtatttggtattgaattcaactgtgctgcaaactggtgtttgttttttagattggtttgtacaaacagtttttagtcactttaattttatgggagcagggttttatttctggctcttttacaagatatatatacaggtgcatcatatactgtattgtaaggatgtaacatgtgaagtgtgcaaaagggttgcacgcagcaacaggcaagaggttagcgtggttgttggtggacgcaagcagatagtgcatgtttacactaactctggctataacttttgtaagagacataattggtattgtagaaattgtgatgattatggtcaccaaaatacatttatgtctcctgaagttgctggcgagctctctgaaaagcttaagcgccatgttaaacctacagcatacgcttaccacgttgtggatgaggcatgcttagttgatgattttgtcaatttaaaatataaagctgcaactcctggtaaggatagtgcatcttcagctgttaagtgtttcagtgttacagatttcttgaagaaagctgtttttcttaaggaagcactgaaatgtgaacaaatatctaatgatggttttatagtgtgtaatacacagagtgctcatgcattagaggaagcaaagaatgcagccatctattatgcgcaatatctgtgtaagccaatacttatacttgaccaggcactttatgagcaattagtagtagagcctgtgtctaagagtgttatagataaagtgtgtagcattttgtctagtataatatctgtagatactgcagctttaaattataaggcaggcacacttcgtgatgctctgctttctattactaaagacgaagaggccgtagatatggctatattctgtcataatcatgatgtggattacactggtgatggttttactaatgtgataccgtcatatggtatagacactggcaagttaacacctcgtgatagagggtttttgataaatgcagatgcttctattgctaacttaagagttaaaaatgctccgccggtagtatggaagttttctgagcttattaagttgtctgacagttgtcttaaatatttaatttcggctactgttaagtcaggtgttcgtttctttataacaaagtctggtgctaaacaagttattgcttgtcatacacagaagttgttagtagagaaaaaggcaggtggtattgttagcggcacctttaagtgttttaagagttattttaaatggctcttgatcttttacatactttttacagcatgttgttcgggttattactatatggaggtgagtaaaagttttgttcaccccatgtatgatgtaaactccacactgcatgttgaaggttttaaagttatagataaaggtgttcttagggaaattgtaccagaagatacatgtttctctaataaatttgttaattttgatgctttttggggcagaccatatgataatagtagaaactgtccaattgtcacagctgttatagatggtgatgggacagtagctacaggtgttcctggttttgtgtcctgggttatggatggtgttatgtttatacatatgacacagactgagagaaaaccgtggtacattcctacttggtttaatagagaaattgtcggttacactcaggattcaattattactgagggtagtttttatacatctatagcgttattttccgctaggtgtttatatttaacagccagcaatacacctcaattgtattgctttaatggtgataatgatgcacctggggctttgccatttggtagtattattcctcatagagtttatttccaacccaatggtgttaggcttatagttccacaacaaatactgcacacaccctacgtagtaaagtttgtatcagacagctattgtaggggtagtgtgtgtgagtacactagaccaggttactgtgtgtcattaaacccacaatgggttttgtttaatgacgaatacacaagtaaacccggtgttttctgtggttctactgttagagaacttatgtttagtatggttagtacattctttactggtgttaaccccaatatctatatgcaattagcaactatgtttttaatactagttgttgttgtattaatctttgcaatggttataaagtttcaaggtgtttttaaagcttatgcaaccactgtttttataacaatgttagtttgggtaattaacgcatttattttgtgtgtacatagttacaacagtgttttagctgttatattactagtactctattgctatgcgtcattggttacaagtcgcaatactgttataataatgcattgttggcttgtttttacctttggtttaatagtacccacatggttggcttgttgctacctgggatttattatttatatgtatacaccgttgtttttatggtgttatggtactacaaaaaacactcgtaagctgtatgatggcaatgagtttgttggtaattatgatcttgctgcgaagagcacttttgttattcgcggctctgaatttgttaagcttactaatgagataggtgataaatttgaggcctacctttcagcgtatgctagattaaagtactattcaggcactggcagtgaacaagattatttgcaagcttgtcgtgcatggttagcttatgctttggaccaatatagaaatagtggtgtggaaattgtttatactccgccacgttactctattggtgttagtagattacaatctggttttaagaaactggtttctcctagtagtgctgttgaaaagtgcattgttagtgtctcttatagaggtaataatcttaatggactgtggctaggtgacactatctactgtcctcgtcatgtattgggtaagttttcaggtgaccaatggaatgatgtacttaatcttgctaataatcatgagtttgaagttacaactcaacatggtgttactttgaatgttgtcagtaggcgtttaaaaggtgcagttttaattttacaaactgctgttgctaatgctgaaactccaaagtataagtttattaaagctaattgtggtgatagtttcactatagcttgtgcttatggtggtacagttgtaggactctaccctgttactatgcgttctaatggtactattagagcatcttttcttgcgggagcctgtggttcagttggttttaatatagaaaagggtgtagttaatttcttttatatgcaccatcttgagttacctaatgcattacacactggaactgacctaatgggtgaattctatggtggttatgttgatgaagaggttgcacaaagagtgccaccagataatttagttactaacaatattgtagcatggctctatgcggcaattattagtgttaaggagagtagtttctcgctgcctaaatggttggagagtactactgttagtgttgatgattataataagtgggctggtgacaatggttttacaccattttctactagtaccgctattactaaattaagtgctataactggagttgatgtttgtaagctccttcgcactattatggtaaaaaatagccagtggggtggtgaccccattttagggcaatataattttgaagatgaattgacaccggagtctgtatttaatcagattggtggtgttagattacaatcttcttttgtaagaaaagctacatcttggttttggagtagatgtgtgttagcttgcttcttatttgtgttgtgtgctattgtcttgtttacggcagtgccacttaaattttatgtatatgcagctgttattttgttaatggctgtactttttatttcttttactgttaaacatgttatggcatatatggatacttttctattgccaacattgattacagttattattggagtttgtgctgaagtgcctttcatctacaatactctaattagtcaagttgttattttcttaagtcaatggtatgacccagtagtctttgatactatggtaccatggatgttcttgccactagtgttgtatactgcttttaagtgtgtacaaggttgctatatgaattctttcaatacttctttgttaatgctgtatcagtttgtgaagttaggttttgttatttacacctcttctaatactcttactgcatacacagaaggtaattgggagttattcttcgagttggtgcacactactgtgttggctaatgttagtagtaattctttaattggtttatttgtttttaagtgtgctaaatggatgttgtattattgtaatgcaacatacttaaacaattatgtactaatggcagttatggttaactgcattggctggctctgcacttgttactttgggttgtattggtgggttaataaggtttttggtttaaccttaggtaaatacaattttaaagtttcagtagatcaatataggtatatgtgtttgcacaagataaacccacctaaaactgtgtgggaagtcttttcgacaaatatacttatacaaggaattggtggtgaccgtgtgttgcctattgctacagttcaagctaaattgagtgatgtaaagtgtacaactgttgttttaatgcagcttttgactaagcttaatgttgaagcaaattcaaaaatgcatgtttatcttgttgagttacacaataaaattcttgcttctgatgatgttggagagtgcatggataatttgttgggtatgcttataacactattttgtatagattctactattgatttgagtgagtattgtgatgacatacttaagaggtcaactgtattacaatcggttactcaagaattctcacatataccctcttatgctgaatatgaaagggctaagaatctttatgaaaaggttttagttgattctaaaaatggtggtgttacacagcaagagcttgctgcatatcgtaaagctgccaatattgcaaagtcagtttttgatagagacttggctgtccaaaagaagttagatagcatggcagagcgtgctatgacaacaatgtataaagaggcgcgtgtaacagatagacgagcaaaattagtctcatcactacatgcgttacttttctcaatgcttaagaaaatagattctgaaaagcttaatgtcttgtttgaccaggctagtagtggtgttgtgcccctagcgactgttccaattgtttgtagtaataagcttacacttgtaataccagacccagaaacgtgggtcaagtgtgtggaaggtgtgcatgttacatattcaacagttgtttggaatatagacactgttattgatgccgatggcacagagttacacccaacttctacaggtagtggattgacatactgtataagtggtgctaatatagcatggcctttaaaggttaacttgactaggaatgggcataataaggttgatgttgttttgcaaaataatgagcttatgccacatggtgttaaaacaaaggcttgcgtagcaggtgtagatcaagcacattgtagcgtagagtctaaatgttattatacaaatattagtggcaattcagttgtagctgctattacttcttcaaatccaaatctgaaagtagcttcgtttttgaatgaggcaggcaatcagatttatgtagacttagacccaccatgtaaatttggcatgaaagtgggtgtcaaggttgaggttgtttacttgtattttataaagaatacaaggtcgattgttaggggtatggtacttggtgctatatctaatgttgttgtcttacagtctaaagggcatgaaacagaggaagtggatgctgttggcattctttcactatgttcatttgcagtagatcccgcggacacatattgtaaatatgtggcagcaggtaatcaacctttaggtaactgtgttaaaatgttgacagtgcataatggtagtggttttgctataacttcaaagccaagtcctactcctgaccaggattcttatggaggagcttctgtgtgtctctattgtagagcacacatagcacatccaggaagtgtaggaaatttagatggacgttgtcaatttaaaggttcttttgtgcaaatacctactacggagaaagaccccgttggattctgtctacgtaataaggtttgcactgtttgccagtgttggattggttatggatgtcagtgtgattcacttagacaaccaaaatcttctgttcaatcagttgctggagcatctgattttgataagaattatttaaacgggtacggggtagcagtgaggctcggctgataccccttgctagtggatgtgatcctgatgttgtaaagcgagcctttgatgtttgtaataaggaatcagctggtatgtttcaaaatttgaagcgtaactgcgctagattccaggaactacgcgatactgaagatggaaatcttgagtatcttgattcttactttgtagttaaacaaaccactcctagtaattatgaacatgaaaaatcttgttacgaagacttaaagtcagaagtaacagctgaccatgacttctttgtgttcaataagaacatttacaatattagtaggcaacggcttactaaatatactatgatggacttctgctatgctttgagacatttcgacccaaaggattgtgaagttcttaaagaaatacttgtcacttatggttgtatagaagactatcaccctaagtggtttgaggagaataaggattggtacgacccaatagaaaactcaaaatattatgtcatgttggctaaaatgggacctattgtacgacgtgctttattgaatgctattgagttcggaaaccttatggttgaaaaaggttatgttggtgttattacactcgataaccaagaccttaatggcaaattttatgattttggtgattttcagaagacggcacctggtgctggtgttcctgtttttgatacgtattattcttacatgatgcccatcatagccatgacggatgctttagcacctgagaggtactttgaatatgatgtgcacaagggttataaatcttatgatctcctcaagtatgattatactgaggagaaacaagaattgtttcagaagtactttaagtactgggatcaagagtatcatcctaactgccgtgactgtagtgatgacaggtgtttgatacattgtgcaaacttcaatatcttgttttctacacttataccgcagacttctttcggtaatttgtgtagaaaagtttttgttgatggtgtaccatttatagctacttgtggctatcattctaaggaacttggtgttattatgaatcaagataacaccatgtctttttcaaaaatgggtttaagtcaactcatgcagtttgttggagatcctgctttgttagtgggaacatccaataatttagttgatcttagaacgtcttgttttagtgtttgtgcgttaacatctggtattactcatcaaacggtaaagccaggtcactttaacaaggatttctatgattttgcagagaaggctggtatgtttaaggagggttcgtctataccacttaaacattttttctatcctcaaactggtaatgctgctataaacgattatgattattatcgttataacaggcctaccatgtttgacatatgtcaacttctattttgtttagaagtgacttctaaatactttgagtgttatgaaggcggctgtataccagctagccaagttgtagttaacaacttagataagagtgcaggctatccatttaataagtttggaaaagcccgcctctattatgaaatgagtctagaggaacaggaccaactcttcgagattacgaagaagaatgtcctacccactataactcaaatgaatttaaaatatgccatatccgcgaaaaatagagcgcgtacagtggcaggtgtgtctatcctttctactatgactaataggcagtttcatcagaagattcttaagtctatagtcaacactagaaatgcttctgtagttattggaacaaccaagttttatggcggttgggacaacatgttgagaaacctgattcagggtgttgaagacccaattcttatgggttgggattatcctaagtgtgatagagcaatgcctaatttgttgcgtatagcagcatccttagtacttgctcgcaaacacactaactgttgtagttggtctgaacgcatttataggttgtataatgaatgcgcccaggtcttatctgaaactgtacttgctacaggtggtatttatgttaaacctggtggcactagcagtggtgatgctactactgcttatgcaaacagtgtttttaacataatacaagccacatctgctaatgttgcgcgtcttttgagtgttataacgcgtgatattgtctatgataatattaagagcttgcagtatgaattgtatcagcaggtctacaggcgagttaattttgacccagcctttgttgaaaagttttattcttacttatgtaagaatttttcgttgatgatcttgtctgacgacggtgttgtttgttacaacaacacattagccaaacaaggtcttgtagcagatatttctggttttagagaggttctctactatcagaataatgtttttatggctgattctaaatgttgggttgaaccagatttagaaaaaggcccacatgagttttgttcacaacacacaatgctagtggaggttgatggtgagcctaagtatttgccatacccagacccttcacgcattttgggtgcatgtgtttttgtagatgacgtggataagacagaacctgtggctgttatggagcgttatatagctcttgccatagatgcttatccactagtacatcatgaaaatgaagagtacaagaaggtattctttgttctccttgcatatatcagaaaactctatcaagagctttctcagaatatgcttatggactactcttttgtaatggatatagacaagggtagtaaattttgggaacaggagttctatgagaatatgtatagagctcctacgactttacaatcttgtggcgtttgtgtagtttgtaatagtcaaactatactacgctgcggtaattgtattcgtaaaccgtttttgtgttgtaagtgttgctatgaccacgtcatgcatacggaccacaaaaatgttttatctataaatccttatatttgctcacagctaggttgcggtgaagcagatgttactaaattgtacctcgggggtatgtcgtacttctgtggtaatcataaaccgaaattgtcaataccgttagtatctaatggtactgtttttggaatttacagggctaattgtgctggtagtgaaaatgttgatgattttaatcaactagctactactaattggtccattgtcgaaccttatattttagcaaatcgctgtagtgattcattgagacgttttgctgcagagacagtaaaagccacagaagaattacataagcaacaatttgctagtgcagaagtgcgagaagtattctcagatcgtgaattgattctatcatgggaaccaggaaaaaccaggccgccattgaatagaaattatgttttcacaggttatcactttacaagaactagtaaggtgcagcttggtgattttacatttgaaaaaggtgaaggtaaggatgttgtctattataaagcaacgtctactgctaaattgtctgtaggagacatttttgttttaacctcacacaatgttgtttctctcgtagcgccaacattgtgtccacaacaaaccttttctaggtttgtaaatttaagacctaatgtaatggtacctgaatgttttgtaaataacattccactttaccatttagtaggtaaacagaagcgtactacagtacaaggtcctcctggcagtggtaaatcccactttgctataggccttgcagtatactttagtagcgctcgtgttgtttttactgcatgttctcatgcagctgttgatgctttatgtgaaaaagcttttaagtttcttaaagttgatgattgcactcgtatagtaccccaaaggactactgtcgattgcttctcaaaatttaaagctaatgacacaggcaaaaagtacatttttagtactattaatgccttgccggaagttagttgtgatattcttttggttgacgaggttagtatgttgaccaattacgaattgtcctttattaatggtaagataaattaccaatatgttgtgtatgtaggtgatccggctcaattaccggcaccccgcactttacttaatggttcactttctccaaaggattataatgttgtcacaaaccttatggtttgtgttaaacctgatattttccttgcaaagtgttatcgttgtcctaaggaaattgtagacactgtgtctactcttgtttatgatggaaagtttattgcaaataacccagaatcacgtgagtgtttcaaggttatagttaataatggcaattctgatgtaggacatgaaagtggttcagcctacaacacaacacaattggaatttgtgaaagactttgtttgtcgcaataaacaatggcgggaagcaatatttatttcaccttacaatgctatgaaccagagagcttaccgtatgcttggacttaatgttcaaacagtagattcttctcaaggttcagagtatgattatgtcatcttctgtgttactgcagattcgcagcatgcactgaatattaatagatttaatgtggcgcttacaagagctaagcgtggtatactagttgtcatgcgccagcgtgatgaattgtattctgctcttaagtttacagagctagatagtgaaacaagtctgcaaggtacaggtttgtttaaaatttgcaacaaagaatttagtggtgtccatcctgcttatgcagtcacaactaaggctcttgctgcaacctataaagttaatgatgaacttgctgcacttgttaatgtggaagctggttcagaaataacatataaacatcttatttctctgttaggattcaagatgagtgttaatgttgaaggctgccacaacatgtttataacacgtgatgaggcaatccgcaatgtaagaggttgggtaggttttgatgtagaagcaacacatgcttgtggcactaacattggtactaacctgccttttcaagtaggtttctctactggtgcagactttgtagtcacgcctgagggacttgtagatacttcaataggcaataattttgagcctgtgaattctaaagcacctccaggtgaacaatttaaccacttgagagtgttatttaaaagtgctaaaccttggcatgttataagaccaaggatagtgcagatgttagcagacaatctatgcaacgtttcagattgtgtagtgtttgtcacatggtgtcatggcctagaactaactactttgcgctattttgttaaaataggcaaggaacaagtttgttcttgtggttctagagctacaacttttaattctcatactcaagcttatgcttgttggaagcattgtttgggttttgattttgtttataacccacttctagtggatattcaacagtggggttactcgggtaacctacagtttaatcatgatttgcactgtaatgtgcatggccacgctcatgtagcttctgttgacgctataatgactcgttgtcttgcaattaacaatgcattttgtcaagatgtcaactgggatttgacataccctcacattgcaaatgaggatgaagtcaattctagttgtagatatctacaacgcatgtatcttaatgcgtgtgttgatgctcttaaagttaatgttgtctatgatataggcaaccctaaaggtattaaatgtgttaggcgtggggatgttaattttagattctatgataagaatccaatagtacgcaacgtcaagcagtttgagtatgactataatcagcacaaagataagtttgctgatggtctttgtatgttttggaattgtaatgtggattgttatcctgataattccttggtttgtaggtatgacacacgaaatttgagtgtgtttaacctaccaggctgtaatggtggtagtctgtacgttaacaaacatgcattctacacacctaaatttgaccgcattagcttccgcaatttgaaagctatgccattctttttttatgactcatcgccttgtgaaaccattcaagtggatggagttgcgcaagaccttgtgtctctagctacgaaagactgtatcacaaagtgcaacattggtggcgctgtttgtaagaaacatgcccagatgtatgcagaatttgtgacttcttacaatgcagctgtcacagctggctttactttctgggtaactaataaacttaacccttataacttatggaaaagtttttcagctctccagtctatcgacaatattgcttataatatgtataagggtggtcattatgatgctattgctggagaaatgcccactgtcataactggagacaaagtttttgttattgatcaaggtgtagaaaaggcagtttttgttaatcaaacaactctacctacatctgtggcgtttgagctatatgcaaagagaaatattcgcacactgccaaacaaccgtattttgaaaggtttaggtgtagacgtaaccaatggatttgtaatttgggattatgctaaccaaacaccattgtatcgtaataccgtcaaggtatgtgcatatacagatattgagccaaatggcctagtagttctgtatgatgatagatatggtgattaccagtcttttcttgctgctgataatgctgttctagtttctacacagtgttataagcgatattcatacgtagaaataccatctaatttgctcgttcagaatggtatgccattaaaagatggagcgaacctgtatgtttataagcgtgttaatggtgcgtttgttacactacctaacacaataaacacccagggtcgaagttatgaaacttttgaacctcgtagtgacattgagcgtgattttctcgctatgtcagaggagagttttgtagaaaggtatggtaaagacttaggcctacaacacatactgtatggtgaagttgataagccccaattaggtggtttacacactgttataggtatgtacagactcttacgtgcgaataagttgaacgcaaagtctgtaactaattcggattctgatgtcatgcaaaattactttgtattgtcggacaatggttcttacaagcaagtgtgtactgttgtggatttactgcttgatgatttcttagaacttcttagaaacatacttaaggagtatggtactaataagtcaaaagttgtaacagtgtcaattgattaccatagcataaattttatgacttggtttgaagatggcagtattaaaacatgttatccacagcttcaatcagcatggacgtgtggttataatatgcctgaactttataaagttcagaattgtgttatggaaccttgcaacattcctaattatggtgttggaataacgttgcctagcggtattcttatgaatgtggcaaagtatacacaactttgtcaatacctttcgaaaacaacaatttgtgtaccgcataacatgcgagtaatgcatttcggagcaggaagcgacaaaggagtggcgccaggtagtactgttcttaaacaatggctcccagaagggacactccttgtcgataatgatattgtagactatgtgtctgatgcacatgtttctgtgctttcagattgcaataaatataatacagagcacaagtttgatcttgtgatatctgatatgtatacagataatgattcaaaaagaaagcatgaaggcgtgatagccaataatggcaatgatgacgttttcatatatctctcaagttttcttcgtaacaatttggctctaggtggtagttttgctgtaaaagtgacagagacaagttggcacgaagttttatatgacattgcacaggattgtgcatggtggacaatgttttgtacagcagtgaatgcctcttcttcagaagcattcttgattggtgttaattatttgggtgcaagtgaaaaggttaaggttagtggaaaaacgctgcacgcaaattatatattttggaggaattgtaattatttacaaacctctgcttatagtatatttgacgttgctaagtttgatttgagattgaaagcaacgccagttgttaatttgaaaactgaacaaaagacagacttagtctttaatttaattaagtgtggtaagttactggtaagagatgttggtaacacctcttttactagtgactcttttgtgtgcactatgtagtgctgttttgtatgacagtagttcttacgtttactactaccaaagtgccttcagaccacctagtggttggcatttacaagggggtgcttatgcggtagttaacatttctagcgaatttaataatgcaggctcttcatcagggtgtactgttggtattattcatggtggtcgtgttgttaatgcttcttctatagctatgacggcaccgtcatcaggtatggcttggtctagcagtcagttttgtactgcacactgtaatttttcagatactacagtgtttgttacacattgttataaacatggtgggtgtcctttaactggcatgcttcaacagaatcttatacgtgtttctgctatgaaaaatggccagcttttctataatttaacagttagtgtagctaagtaccctacttttagatcatttcagtgtgttaataatttaacatccgtatatttaaatggtgatcttgtttacacctctaatgagaccatagatgttacatctgcaggtgtttattttaaagctggtggacctataacttataaagttatgagagaagttaaagccctggcttattttgttaatggtactgcacaagatgttattttgtgtgatggatcacctagaggcttgttagcatgccagtataatactggcaatttttcagatggcttttatccttttactaatagtagtttagttaagcagaagtttattgtctatcgtgaaaatagtgttaatactacttgtacgttacacaatttcatttttcataatgagactggcgccaaccctaatcctagtggtgttcagaatattcaaacttaccaaacaaaaacagctcagagtggttattataattttaatttttcctttctgagtagttttgtttataaggagtctaattttatgtatggatcttatcacccaagttgtaaatttagactagaaactattaataatggcttgtggtttaattcactttcagtttcaattgcttacggtcctcttcaaggtggttgcaagcaatctgtctttaaaggtagagcaacttgttgttatgcttattcatatggaggtccttcgctgtgtaaaggtgtttattcaggtgagttagatcataattttgaatgtggactgttagtttatgttactaagagcggtggctctcgtatacaaacagccactgaaccgccagttataactcaaaacaattataataatattactttaaatacttgtgttgattataatatatatggcagaactggccaaggttttattactaatgtgaccgactcagctgttagttataattatctagcagacgcaggtttggctattttagatacatctggttccatagacatctttgttgtacaaggtgaatatggtcttaattattataaggttaacccttgcgaagatgtcaaccagcagtttgtagtttctggtggtaaattagtaggtattcttacttcacgtaatgagactggttctcagcttcttgagaaccagttttacatcaaaatcactaatggaacacgtcgttttagacgttctattactgaaaatgttgcaaattgcccttatgttagttatggtaagttttgtataaaacctgatggctcaattgccacaatagtaccaaaacaattggaacagtttgtggcacctttatttaatgttactgaaaatgtgctcatacctaacagtttcaacttaactgttacagatgagtacatacaaacgcgtatggataaggtccaaattaattgcctgcagtatgtttgtggcagttctctggattgtagaaagttgtttcaacaatatgggcctgtttgcgacaacatattgtctgtagtaaatagtgttggtcaaaaagaagatatggaacttttgaatttctattcttctactaaaccggctggttttaatacaccagttcttagtaatgttagcactggtgagtttaatatttctcttctgttaacaaatcctagtagtcgtagaaagcgttctcttattgaagaccttctatttacaagcgttgaatctgttggactaccaacaaatgacgcatataaaaattgcactgcaggacctttaggcttttttaaggaccttgcgtgtgctcgtgaatataatggtttgcttgtgttgcctcctatcataacagcagaaatgcaagctttgtatactagttctctagtagcttctatggcttttggtggtattactgcagctggtgctataccttttgccacacaactgcaggctagaattaatcacttgggtattacccagtcacttttgttgaagaatcaagaaaaaattgctgcttcctttaataaggccattggtcatatgcaggaaggttttagaagtacatctctagcattacaacaaattcaagatgttgttagtaaacagagtgctattcttactgagactatggcatcacttaataaaaattttggtgctatttcttctgtgattcaagaaatctaccagcaatttgacgccatacaagcaaatgctcaagtggatcgtcttataactggtagattgtcatcactttctgttttagcatctgctaagcaggcggagtatattagagtgtcacaacagcgtgagttagctactcagaaaattaatgagtgtgttaagtcacagtctattaggtactccttttgtggtaatggacgacatgttctaaccataccgcaaaatgcacctaatggtatagtgtttatacacttttcttatactccagatagttttgttaatgttactgcaatagtgggtttttgtgtaaagccagctaatgctagtcagtatgcaatagtgcccgctaatggtaggggtatttttatacaagttaatggtagttactacatcactgcacgagatatgtatatgccaagagctattactgcaggagatgtagttacgcttacttcttgtcaagcaaattatgtaagtgtaaataagaccgtcattactacattcgtagacaatgatgattttgattttaatgacgaattgtcaaaatggtggaatgatactaagcatgagctaccagactttgacaaattcaattacacagtacctatacttgacattgatagtgaaattgatcgtattcaaggcgttatacagggtcttaatgactctctaatagaccttgaaaaactttcaatactcaaaacttatattaagtggccttggtatgtgtggttagccatagcttttgccactattatcttcatcttaatactaggatgggttttcttcatgactggttgttgtggttgttgttgtggatgctttggcattatgcctctaatgagtaagtgtggtaagaaatcttcttattacacgacttttgataacgatgtggtaactgaacaatacagacctaaaaagtctgtttgatgatccaaagtcccacgtccttcctaatagtattaattcttctttggtgtaaacttgtactaagttgttttagagagtttattatagcgctccaacaactaatacaagttttactccaaattatcaatagtaacttacagtctagactgaccctttggcacagtctagactaatgttaaacttagaagtaattattgaaactggtgagcaagtgattcaaaaaatcagtttcaatttacagcatatttcaagtgtattaaacacagaagtatttgatccctttgactattgttattacagaggaggtaatttttgggaaatagagtcagctgaagattgttcaggtgatgatgaatttattgaataagtcgctagaggagaatggaagttttctaacagcgctttacataattgtaggatttttagcactttatcttctaggtagagcacttcaagcatttgtacaggctgctgatgcttgttgtttattttggtatacatgggtagtaattccaggagctaagggtacagcctttgtatacaagtatacatatggtagaaaacttaacaatccggaattagaagcagttattgttaacgagtttcctaagaacggttggaataataaaaatccagcaaattttcaagatgcccaacgagacaaattgtactcttgactttgaacagtcagttcagctttttaaagagtataatttatttataactgcattcttgttgttcttaaccataatacttcagtatggctatgcaacaagaagtaaggttatttatacactgaaaatgatagtgttatggtgcttttggccccttaacattgcagtaggtgtaatttcatgtacatacccaccaaacacaggaggtcttgtcgcagcgataatacttacagtgtttgcgtgtctgtcttttgtaggttattggatccagagtattagactctttaagcggtgtaggtcatggtggtcatttaatccagaatctaatgccgtaggttcaatactcctaactaatggtcaacaatgtaattttgctatagagagtgtgccaatggtgctttctccaattataaagaatggtgttctttattgtgagggtcagtggcttgctaagtgtgaaccagaccacttgcctaaagatatatttgtttgtacaccggatagacgtaatatctaccgtatggtgcagaaatatactggtgaccaaagcggaaataagaaaaggtttgctacgtttgtctatgcaaagcagtcagtagatactggcgagctagaaagtgtagcaacaggaggaagtagtctttacacataaatgtgtgtgtgtagagagtatttaaaattattctttaatagcgcctctgttttaagagcgcataagagtatttattttgaggatactaatataaatcctctttgttttatactctcctttcaagagctattaacggtgttacctttcaagtagataatggaaaagtctactacgaaggaacaccagttttccaaaaaggttgttgtaggatgtggtccaattataagaaagaataattgaaccacctactacacttatttttataagaggtgttttacttaacaaaaacttaacaaatacggacgatgaaatggctgactagttttggaagagcagttatttcttgttataaatccctactattaactcaacttagagtgttagataggttaattttagatcacggactactacgcgttttaacgtgtagtaggcgcgtgcttttagttcaattagatttagtttataggttggcgtatacgcccacccaatcgctggcatgaataatagtaaagataatccttttcgcggagcaatagcaagaaaagctcgaatttatctgagagaaggattagattgtgtttactttcttaacaaagcaggacaagcagagccttgtcccgcgtgtacctctctagtattccaagggaaaacttgtgaggaacacatacataataataatcttttgtcatggcaagcggtaaagcagctggaaaaacagacgccccagcgccagtcattaaactaggaggaccaaaaccacctaaagtcggttcttctggaaatgcatcttggtttcaagcaataaaagccaagaagttaaatacacctccgcccaagtttgaaggtagcggtgttcctgataacgaaaacattaagccaagccagcaacatggatactggagacgccaagccaggtttaagccaggcaaaggtggaagaaaaccagtcccagatgcttggtacttttactatactggaacaggacctgccgctgacctgaactggggtgatactcaagatggtatagtgtgggttgctgctaagggtgctgatactaaatctagatccaatcagggtacaagagatcctgataagtttgaccaatacccactacgattctcggatggcggacctgatggtaatttccgttgggacttcattcccctgaaccgtggtaggagtggaagatcaacagcagcttcatcagcagcagctagtagagcaccatcacgtgaaggttcgcgtggtcgtagaagtgattctggagatgaccttattgctcgtgcagcaaagataatccaggatcagcagaaaaagggctctcgcattaccaaggcaaaggcagatgaaatggctcatcgccggtattgcaagcgcactatcccacctaattatagggttgatcaagtgtttggtccccgtactaaaggtaaggaggggaattttggtgatgacaagatgaatgaggaaggtattaaggatgggcgtgttacagcaatgctcaacctagtccctagcagccatgcttgtctttttggaagtagagtgacacccaaacttcaactagatgggcttcacttgagatttgaatttactactgtggtcccatgtgatgacccgcagtttgataattatgtgaaaatttgtgatcagtgtgtcgatggtgtaggaacgcgtccaaaagatgacgaaccaaaaccaaagtcacgctcaagttcaagacctgctacaagaggaaattctccagcgccaagacaacagcgcccaaagaaggagaaaaagctaaagaagcaggatgatgaagcagataaagcattgacctcagatgaggagaggaacaatgcacagctggaattttatgatgagcccaaggtaattaactggggggatgcagctctaggagagaatgaactttgagtaacataatggacctgttgtttcctggtacattttgttaaacactatttctgtgctttcctatcaattattacaggcattgattgtgattatgttcaatacttaagcttcttttggttgctttttgcttattgtattgttgctgtgctttttattgttgtgattctcattagtttgctttatcgtagaaattcaatagtaagagttaaggaagataggcatgtagcttgattacctacatgtctatcgccagggaaatgtctaatctgtctacttagtagcctggaaacgaacggtagacccttagattttaatttagtttaatttttagtttagtttaagttagtttagagtaggtataaagatgccagtgccggggccacgcggagtacgatcgagggtacagcactaggacgcccattaggggaagagctaaattttagtttaagttaagtttaattggctaagtatagttaaaatttataggctagtatagagttagagca

SEQ ID NO: 15 - DNA, 27608 bp, Coronavirus; identical to SEQ ID NO: 14

SEQ ID NO: 16 - DNA, 20500 bp, Coronavirus
acttaagatagatattaatatatatctattacactagccttgcgctagatttttaacttaacaaaacggacttaaatacctacagctggtcctcataggtgttccattgcagtgcactttagtgccctggatggcacctggccacctgtcaggtttttgttattaaaatcttattgttgctggtatcactgcttgttttgccgtgtctcactttatacatctgttgcttgggctacctagtgtccagcgtcctacgggcgtcgtggctggttcgagtgcgaggaacctctggttcatctagcggtaggcgggtgtgtggaagtagcacttcagacgtaccggttctgttgtgtgaaatacggggtcacctccccccacatacctctaagggcttttgagcctagcgttgggctacgttctcgcataaggtcggctatacgacgtttgtagggggtagtgccaaacaacccctgaggtgacaggttctggtggtgtttagtgagcagacatacaatagacagtgacaacatggcttcaagcctaaaacagggagtatctcccaaaccacgggatgtcattcttgtgtccaaagacatccctgaacaactttgtgacgctttgtttttctatacgtcacataaccctaaggattacgctgatgcttttgcagttaggcagaagtttgaccgtagtctccagactgggaaacagttcaaatttgaaactgtgtgtggtctcttcctcttgaagggagttgacaaaataacacctggcgtcccagcaaaagttttaaaagccacttctaagttggcagatttagaagacatctttggtgtctctcctttagcgcggaagtaccgtgaattgttgaaaacagcgtgtcagtggtctcttactgtagaagcactggatgttcgtgcacaaactctcgatgaaatttttgaccccactgaaatactttggcttcaggtggctgcaaaaattcatgtttcatctatggcaatgcgcaggcttgttggagaagtaactgcaaaagtcatggatgctctgggctcaaacttgagtgctctttttcaaattgttaaacaacaaatagccagaatctttcaaaaggcactggctatttttgagaatgtgaatgaattaccacagcgtattgcagcacttaagatggcttttgccaagtgtgctaggtcaattactgttgtggttgttgaaagaactctagttgttaaagagttcgcaggaacttgtcttgcaagcattaatggtgctgtcgcaaaattctttgaagagttgccaaacggcttcatgggttctaagattttcacaacacttgccttctttaaagaggcagctgtgagagttgtggagaacataccaaatgcaccgagaggtactaagggatttgaagttgttggcaatgccaaaggcacacaggtagttgtgcgcggcatgcgaaatgacttaacattgcttgaccaaaaagctgatattcctgttgaaccagaaggttggtctgcaattttggatggacatctttgctatgtctttaggagtggtgatcgcttttatgctgcacctctttcaggaaattttgctttgagtgatgttcattgctgtgagcgtgtagtctgtctatctgatggtgtaacaccggagataaatgatggactcattctagctgcaatctactcttcttttagtgtctctgagcttgtaacagctcttaaaaagggtgaaccattcaagttcttgggccataaattcgtgtatgcgaaggatgcagcagtgtcttttactttagcgaaggctgccactattgcagatgtcttgaggctgtttcaatcagctcgtgtgatagcagaagatgtttggtcttcatttactgaaaagtcttttgaattctggaagcttgcatatggaaaagtgcgcaaccttgaagaatttgtgaagacctatgtttgtaaggctcaaatgtcgattgtgattctagcagcagtgcttggagaggacatttggcatcttgtctcacaagtcatctataaattaggtgttctttttactaaagtcgttgacttttgtgacaaacactggaaaggtttttgtgtacagttgaaaagagctaagctcattgtcaccgaaaccttctgtgttttaaaaggagttgcacagcattgttttcaactgctgctagatgcaatacactctttgtacaagagttttaagaagtgtgcacttggtagaatccatggagatttgctcttctggaaaggaggtgtgcataaaattgttcaagatggcgatgaaatatggtttgacgccattgatagtgttgatgttgaagatctgggtgttgttcaggaaaaatcgattgattttgaggtttgcgatgacgtgacacttccagaaaaccaacctggtcatatggttcaaatagaggatgatggtaagaactacatgttcttccgttttaaaaaggatgagaacatttattatacaccaatgtctcaacttggtgctattaatgtggtttgcaaagcaggcggtaagactgtcacctttggagaaactacagtacaagagataccaccacctgatgtcgtgcctattaaggttagcatagaatgttgtggtgaaccatggaatacgatcttcaagaaggcttataaagagcctatagaagtagatacagacctcacagtagaacaattgctctctgtgatctatgagaaaatgtgtgacgaccttaaattgtttccagaggcaccagagcctccaccatttgagaatgtcgcacttgttgataagaacggtaaagatttggattgtataaaatcttgccatttgatctatcgtgactatgagagcgatgatgacatcgaggaggaagatgctgaggagtgtgacacagactcaggtgaagctgaggagtgtgacactaattcagaatgtgaagaagaggatgaggatactaaagtgttggctcttatacaagacccggcaagtattaaataccctctgcctcttgatgaagattatagcgtctataatggatgtattgtacacaaggacgctcttgatgttgtgaatttaccatctggtgaagaaacttttgttgtcaataactgttttgagggagctgttaaaccacttccacagaaggtagttgatgttcttggtgactggggagaggctgttgatgcgcaagaacaactgtgtcaacaagagcctctgcaacatacctttgaagaaccagtcgaaaattctactggtagttctaagacaatgactgaacaagtcgttgtagaagatcaagaactacctgttgttgaacaagatcaggatgtagttgtttatacacctacagatcttgaagttgcaaaagaaacagcagaagaggttgatgagtttattctcatttttgctgttcctaaagaagaagttgtgtcccagaaagatggggcacagattaaacaagagcctattcaagttgttaaaccacaacgtgagaagaaggctaaaaagttcaaagttaaaccagccacatgtgagaaacctaaatttttggagtataaaacatgtgtgggtgatttgactgttgtaattgccaaagcattggatgagtttaaagagttctgcattgtaaatgctgcaaatgagcatatgactcatggtagtggcgttgcaaaggcaattgcagacttttgtggactggattttgttgaatattgtgaggactatgttaagaaacatgggccacaacagagacttgttacaccttcgtttgtcaaaggcattcaatgtgtgaataatgttgtaggaccccgccatggagacaacaacttgcatgagaagcttgttgctgcctacaagaatgtgcttgtagatggcgtagtcaattatgttgtgccagttctttcattaggaatttttggtgtagattttaaaatgtcaatagacgcaatgcgtgaagcttttgaaggttgcaccatacgcgttcttttgttttctctgagccaagaacacatcgattatttcgatgtaacttgcaaacagaagacaatttatcttacggaggatggtgttaaataccgctccattgttctaaaacctggtgactcattgggtcaatttggacaggtttatgctaaaaacaagatagtttttacagccgatgatgttgaggacaaagaaattctctacgtccccacgactgataaaagcattcttgaatactatggtttagatgcgcaaaagtatgtaatatatttgcaaacgcttgcgcagaaatggaatgtccaatatagggacaattttcttatactagagtggcgcgatggaaattgttggattagttcagcaatagttctccttcaagctgctaaaattaggtttaaaggttttctaacagaagcgtgggctaaactgttaggtggagatcctacagactttgttgcctggtgttatgcaagttgtactgctaaagtaggtgatttctcagatgctaattggcttttagcgaatttagcagaacattttgacgcagattacacaaatgcgtttcttaagaagcgcgtttcgtgtaactgtggtattaagagctatgagcttagaggccttgaagcttgtattcagccagttcgggcaactaatctgctacattttaagacgcaatattcaaattgcccaacctgtggcgcaaataatacggatgaagtaatagaagcttcgttaccgtacttattgctttttgctactgatggtcctgctacagttgattgtgatgaagatgctgtggggactgtcgtgtttgttggttctactaatagtggccattgttatacacaagctgcagggcaagcttttgataatcttgctaaagatagaaaatttggaaagaagtcgccttacattactgcaatgtatacgcgattcgcttttaagaatgaaacctctttgcctgttgctaaacagagcaagggtaagtctaagtcggtaaaggaagatgtttctaaccttgctactagttctaaggccagttttgataatcttactgacttcgaacagtggtatgatagtaacatctatgaaagtcttaaagtgcaggaatcacctgataactttgataaatatgtgtcattcacaacaaaggaagattctaagttgccattgacacttaaggttagaggtattaaatcagttgttgactttagatcgaaggatggttttatttataagttaacacctgatactgatgaaaattcaaaagcaccagtctactacccagtcttggacgctattagtcttaaggcaatatgggtggaaggtaatgctaactttgttgttggtcatccaaattattatagtaagtctcttcatattcctactttttgggaaaatgctgagaattttgttaaaatgggtgataaaattggtggtgtaactatgggactttggcgtgcagaacaccttaataaacctaatttggagagaattttcaacattgctaagaaagccattgttggatctagtgttgttactacacaatgcggtaaattaataggtaaagcagctacattcattgctgataaagtaggtggtggtgtagttcgcaatattacagatagcattaagggtctttgtggaattacacgagggcattttgaaagaaaaatgtctccacaattcctaaagacgcttatgttctttttattctatttcttgaaggctagtgttaagagtgttgtcgctagctataagaccgtgttatgtaaggtggtacttgctactttacttatagtttggtttgtctacacaagtaacccagtaatgtttacaggaatacgtgtgttagattttctattcgagggttctttgtgtggtccttataaagactatggtaaagattcttttgatgtgttacgatattgtgcagatgattttatttgtcgtgtgtgtttacatgacaaagattcacttcatttgtacaaacacgcttatagtgtagagcaggtctataaagatgcagcttctggttttatttttaattggaattggctttatttggtctttctaatattatttgttaaaccagtggcaggttttgttattatttgctattgtgttaagtatttggtattgaattcaactgtgctgcaaactggtgtttgttttttagattggtttgtacaaacagtttttagtcactttaattttatgggagcagggttttatttctggctcttttacaagatatatatacaggtgcatcatatactgtattgtaaggatgtaacatgtgaagtgtgcaaaagggttgcacgcagcaacaggcaagaggttagcgtggttgttggtggacgcaagcagatagtgcatgtttacactaactctggctataacttttgtaagagacataattggtattgtagaaattgtgatgattatggtcaccaaaatacatttatgtctcctgaagttgctggcgagctctctgaaaagcttaagcgccatgttaaacctacagcatacgcttaccacgttgtggatgaggcatgcttagttgatgattttgtcaatttaaaatataaagctgcaactcctggtaaggatagtgcatcttcagctgttaagtgtttcagtgttacagatttcttgaagaaagctgtttttcttaaggaagcactgaaatgtgaacaaatatctaatgatggttttatagtgtgtaatacacagagtgctcatgcattagaggaagcaaagaatgcagccatctattatgcgcaatatctgtgtaagccaatacttatacttgaccaggcactttatgagcaattagtagtagagcctgtgtctaagagtgttatagataaagtgtgtagcattttgtctagtataatatctgtagatactgcagctttaaattataaggcaggcacacttcgtgatgctctgctttctattactaaagacgaagaggccgtagatatggctatattctgtcataatcatgatgtggattacactggtgatggttttactaatgtgataccgtcatatggtatagacactggcaagttaacacctcgtgatagagggtttttgataaatgcagatgcttctattgctaacttaagagttaaaaatgctccgccggtagtatggaagttttctgagcttattaagttgtctgacagttgtcttaaatatttaatttcggctactgttaagtcaggtgttcgtttctttataacaaagtctggtgctaaacaagttattgcttgtcatacacagaagttgttagtagagaaaaaggcaggtggtattgttagcggcacctttaagtgttttaagagttattttaaatggctcttgatcttttacatactttttacagcatgttgttcgggttattactatatggaggtgagtaaaagttttgttcaccccatgtatgatgtaaactccacactgcatgttgaaggttttaaagttatagataaaggtgttcttagggaaattgtaccagaagatacatgtttctctaataaatttgttaattttgatgctttttggggcagaccatatgataatagtagaaactgtccaattgtcacagctgttatagatggtgatgggacagtagctacaggtgttcctggttttgtgtcctgggttatggatggtgttatgtttatacatatgacacagactgagagaaaaccgtggtacattcctacttggtttaatagagaaattgtcggttacactcaggattcaattattactgagggtagtttttatacatctatagcgttattttccgctaggtgtttatatttaacagccagcaatacacctcaattgtattgctttaatggtgataatgatgcacctggggctttgccatttggtagtattattcctcatagagtttatttccaacccaatggtgttaggcttatagttccacaacaaatactgcacacaccctacgtagtaaagtttgtatcagacagctattgtaggggtagtgtgtgtgagtacactagaccaggttactgtgtgtcattaaacccacaatgggttttgtttaatgacgaatacacaagtaaacccggtgttttctgtggttctactgttagagaacttatgtttagtatggttagtacattctttactggtgttaaccccaatatctatatgcaattagcaactatgtttttaatactagttgttgttgtattaatctttgcaatggttataaagtttcaaggtgtttttaaagcttatgcaaccactgtttttataacaatgttagtttgggtaattaacgcatttattttgtgtgtacatagttacaacagtgttttagctgttatattactagtactctattgctatgcgtcattggttacaagtcgcaatactgttataataatgcattgttggcttgtttttacctttggtttaatagtacccacatggttggcttgttgctacctgggatttattatttatatgtatacaccgttgtttttatggtgttatggtactacaaaaaacactcgtaagctgtatgatggcaatgagtttgttggtaattatgatcttgctgcgaagagcacttttgttattcgcggctctgaatttgttaagcttactaatgagataggtgataaatttgaggcctacctttcagcgtatgctagattaaagtactattcaggcactggcagtgaacaagattatttgcaagcttgtcgtgcatggttagcttatgctttggaccaatatagaaatagtggtgtggaaattgtttatactccgccacgttactctattggtgttagtagattacaatctggttttaagaaactggtttctcctagtagtgctgttgaaaagtgcattgttagtgtctcttatagaggtaataatcttaatggactgtggctaggtgacactatctactgtcctcgtcatgtattgggtaagttttcaggtgaccaatggaatgatgtacttaatcttgctaataatcatgagtttgaagttacaactcaacatggtgttactttgaatgttgtcagtaggcgtttaaaaggtgcagttttaattttacaaactgctgttgctaatgctgaaactccaaagtataagtttattaaagctaattgtggtgatagtttcactatagcttgtgcttatggtggtacagttgtaggactctaccctgttactatgcgttctaatggtactattagagcatcttttcttgcgggagcctgtggttcagttggttttaatatagaaaagggtgtagttaatttcttttatatgcaccatcttgagttacctaatgcattacacactggaactgacctaatgggtgaattctatggtggttatgttgatgaagaggttgcacaaagagtgccaccagataatttagttactaacaatattgtagcatggctctatgcggcaattattagtgttaaggagagtagtttctcgctgcctaaatggttggagagtactactgttagtgttgatgattataataagtgggctggtgacaatggttttacaccattttctactagtaccgctattactaaattaagtgctataactggagttgatgtttgtaagctccttcgcactattatggtaaaaaatagccagtggggtggtgaccccattttagggcaatataattttgaagatgaattgacaccggagtctgtatttaatcagattggtggtgttagattacaatcttcttttgtaagaaaagctacatcttggttttggagtagatgtgtgttagcttgcttcttatttgtgttgtgtgctattgtcttgtttacggcagtgccacttaaattttatgtatatgcagctgttattttgttaatggctgtactttttatttcttttactgttaaacatgttatggcatatatggatacttttctattgccaacattgattacagttattattggagtttgtgctgaagtgcctttcatctacaatactctaattagtcaagttgttattttcttaagtcaatggtatgacccagtagtctttgatactatggtaccatggatgttcttgccactagtgttgtatactgcttttaagtgtgtacaaggttgctatatgaattctttcaatacttctttgttaatgctgtatcagtttgtgaagttaggttttgttatttacacctcttctaatactcttactgcatacacagaaggtaattgggagttattcttcgagttggtgcacactactgtgttggctaatgttagtagtaattctttaattggtttatttgtttttaagtgtgctaaatggatgttgtattattgtaatgcaacatacttaaacaattatgtactaatggcagttatggttaactgcattggctggctctgcacttgttactttgggttgtattggtgggttaataaggtttttggtttaaccttaggtaaatacaattttaaagtttcagtagatcaatataggtatatgtgtttgcacaagataaacccacctaaaactgtgtgggaagtcttttcgacaaatatacttatacaaggaattggtggtgaccgtgtgttgcctattgctacagttcaagctaaattgagtgatgtaaagtgtacaactgttgttttaatgcagcttttgactaagcttaatgttgaagcaaattcaaaaatgcatgtttatcttgttgagttacacaataaaattcttgcttctgatgatgttggagagtgcatggataatttgttgggtatgcttataacactattttgtatagattctactattgatttgagtgagtattgtgatgacatacttaagaggtcaactgtattacaatcggttactcaagaattctcacatataccctcttatgctgaatatgaaagggctaagaatctttatgaaaaggttttagttgattctaaaaatggtggtgttacacagcaagagcttgctgcatatcgtaaagctgccaatattgcaaagtcagtttttgatagagacttggctgtccaaaagaagttagatagcatggcagagcgtgctatgacaacaatgtataaagaggcgcgtgtaacagatagacgagcaaaattagtctcatcactacatgcgttacttttctcaatgcttaagaaaatagattctgaaaagcttaatgtcttgtttgaccaggctagtagtggtgttgtgcccctagcgactgttccaattgtttgtagtaataagcttacacttgtaataccagacccagaaacgtgggtcaagtgtgtggaaggtgtgcatgttacatattcaacagttgtttggaatatagacactgttattgatgccgatggcacagagttacacccaacttctacaggtagtggattgacatactgtataagtggtgctaatatagcatggcctttaaaggttaacttgactaggaatgggcataataaggttgatgttgttttgcaaaataatgagcttatgccacatggtgttaaaacaaaggcttgcgtagcaggtgtagatcaagcacattgtagcgtagagtctaaatgttattatacaaatattagtggcaattcagttgtagctgctattacttcttcaaatccaaatctgaaagtagcttcgtttttgaatgaggcaggcaatcagatttatgtagacttagacccaccatgtaaatttggcatgaaagtgggtgtcaaggttgaggttgtttacttgtattttataaagaatacaaggtcgattgttaggggtatggtacttggtgctatatctaatgttgttgtcttacagtctaaagggcatgaaacagaggaagtggatgctgttggcattctttcactatgttcatttgcagtagatcccgcggacacatattgtaaatatgtggcagcaggtaatcaacctttaggtaactgtgttaaaatgttgacagtgcataatggtagtggttttgctataacttcaaagccaagtcctactcctgaccaggattcttatggaggagcttctgtgtgtctctattgtagagcacacatagcacatccaggaagtgtaggaaatttagatggacgttgtcaatttaaaggttcttttgtgcaaatacctactacggagaaagaccccgttggattctgtctacgtaataaggtttgcactgtttgccagtgttggattggttatggatgtcagtgtgattcacttagacaaccaaaatcttctgttcaatcagttgctggagcatctgattttgataagaattatttaaacgggtacggggtagcagtgaggctcggctgataccccttgctagtggatgtgatcctgatgttgtaaagcgagcctttgatgtttgtaataaggaatcagctggtatgtttcaaaatttgaagcgtaactgcgctagattccaggaactacgcgatactgaagatggaaatcttgagtatcttgattcttactttgtagttaaacaaaccactcctagtaattatgaacatgaaaaatcttgttacgaagacttaaagtcagaagtaacagctgaccatgacttctttgtgttcaataagaacatttacaatattagtaggcaacggcttactaaatatactatgatggacttctgctatgctttgagacatttcgacccaaaggattgtgaagttcttaaagaaatacttgtcacttatggttgtatagaagactatcaccctaagtggtttgaggagaataaggattggtacgacccaatagaaaactcaaaatattatgtcatgttggctaaaatgggacctattgtacgacgtgctttattgaatgctattgagttcggaaaccttatggttgaaaaaggttatgttggtgttattacactcgataaccaagaccttaatggcaaattttatgattttggtgattttcagaagacggcacctggtgctggtgttcctgtttttgatacgtattattcttacatgatgcccatcatagccatgacggatgctttagcacctgagaggtactttgaatatgatgtgcacaagggttataaatcttatgatctcctcaagtatgattatactgaggagaaacaagaattgtttcagaagtactttaagtactgggatcaagagtatcatcctaactgccgtgactgtagtgatgacaggtgtttgatacattgtgcaaacttcaatatcttgttttctacacttataccgcagacttctttcggtaatttgtgtagaaaagtttttgttgatggtgtaccatttatagctacttgtggctatcattctaaggaacttggtgttattatgaatcaagataacaccatgtctttttcaaaaatgggtttaagtcaactcatgcagtttgttggagatcctgctttgttagtgggaacatccaataatttagttgatcttagaacgtcttgttttagtgtttgtgcgttaacatctggtattactcatcaaacggtaaagccaggtcactttaacaaggatttctatgattttgcagagaaggctggtatgtttaaggagggttcgtctataccacttaaacattttttctatcctcaaactggtaatgctgctataaacgattatgattattatcgttataacaggcctaccatgtttgacatatgtcaacttctattttgtttagaagtgacttctaaatactttgagtgttatgaaggcggctgtataccagctagccaagttgtagttaacaacttagataagagtgcaggctatccatttaataagtttggaaaagcccgcctctattatgaaatgagtctagaggaacaggaccaactcttcgagattacgaagaagaatgtcctacccactataactcaaatgaatttaaaatatgccatatccgcgaaaaatagagcgcgtacagtggcaggtgtgtctatcctttctactatgactaataggcagtttcatcagaagattcttaagtctatagtcaacactagaaatgcttctgtagttattggaacaaccaagttttatggcggttgggacaacatgttgagaaacctgattcagggtgttgaagacccaattcttatgggttgggattatcctaagtgtgatagagcaatgcctaatttgttgcgtatagcagcatccttagtacttgctcgcaaacacactaactgttgtagttggtctgaacgcatttataggttgtataatgaatgcgcccaggtcttatctgaaactgtacttgctacaggtggtatttatgttaaacctggtggcactagcagtggtgatgctactactgcttatgcaaacagtgtttttaacataatacaagccacatctgctaatgttgcgcgtcttttgagtgttataacgcgtgatattgtctatgataatattaagagcttgcagtatgaattgtatcagcaggtctacaggcgagttaattttgacccagcctttgttgaaaagttttattcttacttatgtaagaatttttcgttgatgatcttgtctgacgacggtgttgtttgttacaacaacacattagccaaacaaggtcttgtagcagatatttctggttttagagaggttctctactatcagaataatgtttttatggctgattctaaatgttgggttgaaccagatttagaaaaaggcccacatgagttttgttcacaacacacaatgctagtggaggttgatggtgagcctaagtatttgccatacccagacccttcacgcattttgggtgcatgtgtttttgtagatgacgtggataagacagaacctgtggctgttatggagcgttatatagctcttgccatagatgcttatccactagtacatcatgaaaatgaagagtacaagaaggtattctttgttctccttgcatatatcagaaaactctatcaagagctttctcagaatatgcttatggactactcttttgtaatggatatagacaagggtagtaaattttgggaacaggagttctatgagaatatgtatagagctcctacgactttacaatcttgtggcgtttgtgtagtttgtaatagtcaaactatactacgctgcggtaattgtattcgtaaaccgtttttgtgttgtaagtgttgctatgaccacgtcatgcatacggaccacaaaaatgttttatctataaatccttatatttgctcacagctaggttgcggtgaagcagatgttactaaattgtacctcgggggtatgtcgtacttctgtggtaatcataaaccgaaattgtcaataccgttagtatctaatggtactgtttttggaatttacagggctaattgtgctggtagtgaaaatgttgatgattttaatcaactagctactactaattggtccattgtcgaaccttatattttagcaaatcgctgtagtgattcattgagacgttttgctgcagagacagtaaaagccacagaagaattacataagcaacaatttgctagtgcagaagtgcgagaagtattctcagatcgtgaattgattctatcatgggaaccaggaaaaaccaggccgccattgaatagaaattatgttttcacaggttatcactttacaagaactagtaaggtgcagcttggtgattttacatttgaaaaaggtgaaggtaaggatgttgtctattataaagcaacgtctactgctaaattgtctgtaggagacatttttgttttaacctcacacaatgttgtttctctcgtagcgccaacattgtgtccacaacaaaccttttctaggtttgtaaatttaagacctaatgtaatggtacctgaatgttttgtaaataacattccactttaccatttagtaggtaaacagaagcgtactacagtacaaggtcctcctggcagtggtaaatcccactttgctataggccttgcagtatactttagtagcgctcgtgttgtttttactgcatgttctcatgcagctgttgatgctttatgtgaaaaagcttttaagtttcttaaagttgatgattgcactcgtatagtaccccaaaggactactgtcgattgcttctcaaaatttaaagctaatgacacaggcaaaaagtacatttttagtactattaatgccttgccggaagttagttgtgatattcttttggttgacgaggttagtatgttgaccaattacgaattgtcctttattaatggtaagataaattaccaatatgttgtgtatgtaggtgatccggctcaattaccggcaccccgcactttacttaatggttcactttctccaaaggattataatgttgtcacaaaccttatggtttgtgttaaacctgatattttccttgcaaagtgttatcgttgtcctaaggaaattgtagacactgtgtctactcttgtttatgatggaaagtttattgcaaataacccagaatcacgtgagtgtttcaaggttatagttaataatggcaattctgatgtaggacatgaaagtggttcagcctacaacacaacacaattggaatttgtgaaagactttgtttgtcgcaataaacaatggcgggaagcaatatttatttcaccttacaatgctatgaaccagagagcttaccgtatgcttggacttaatgttcaaacagtagattcttctcaaggttcagagtatgattatgtcatcttctgtgttactgcagattcgcagcatgcactgaatattaatagatttaatgtggcgcttacaagagctaagcgtggtatactagttgtcatgcgccagcgtgatgaattgtattctgctcttaagtttacagagctagatagtgaaacaagtctgcaaggtacaggtttgtttaaaatttgcaacaaagaatttagtggtgtccatcctgcttatgcagtcacaactaaggctcttgctgcaacctataaagttaatgatgaacttgctgcacttgttaatgtggaagctggttcagaaataacatataaacatcttatttctctgttaggattcaagatgagtgttaatgttgaaggctgccacaacatgtttataacacgtgatgaggcaatccgcaatgtaagaggttgggtaggttttgatgtagaagcaacacatgcttgtggcactaacattggtactaacctgccttttcaagtaggtttctctactggtgcagactttgtagtcacgcctgagggacttgtagatacttcaataggcaataattttgagcctgtgaattctaaagcacctccaggtgaacaatttaaccacttgagagtgttatttaaaagtgctaaaccttggcatgttataagaccaaggatagtgcagatgttagcagacaatctatgcaacgtttcagattgtgtagtgtttgtcacatggtgtcatggcctagaactaactactttgcgctattttgttaaaataggcaaggaacaagtttgttcttgtggttctagagctacaacttttaattctcatactcaagcttatgcttgttggaagcattgtttgggttttgattttgtttataacccacttctagtggatattcaacagtggggttactcgggtaacctacagtttaatcatgatttgcactgtaatgtgcatggccacgctcatgtagcttctgttgacgctataatgactcgttgtcttgcaattaacaatgcattttgtcaagatgtcaactgggatttgacataccctcacattgcaaatgaggatgaagtcaattctagttgtagatatctacaacgcatgtatcttaatgcgtgtgttgatgctcttaaagttaatgttgtctatgatataggcaaccctaaaggtattaaatgtgttaggcgtggggatgttaattttagattctatgataagaatccaatagtacgcaacgtcaagcagtttgagtatgactataatcagcacaaagataagtttgctgatggtctttgtatgttttggaattgtaatgtggattgttatcctgataattccttggtttgtaggtatgacacacgaaatttgagtgtgtttaacctaccaggctgtaatggtggtagtctgtacgttaacaaacatgcattctacacacctaaatttgaccgcattagcttccgcaatttgaaagctatgccattctttttttatgactcatcgccttgtgaaaccattcaagtggatggagttgcgcaagaccttgtgtctctagctacgaaagactgtatcacaaagtgcaacattggtggcgctgtttgtaagaaacatgcccagatgtatgcagaatttgtgacttcttacaatgcagctgtcacagctggctttactttctgggtaactaataaacttaacccttataacttatggaaaagtttttcagctctccagtctatcgacaatattgcttataatatgtataagggtggtcattatgatgctattgctggagaaatgcccactgtcataactggagacaaagtttttgttattgatcaaggtgtagaaaaggcagtttttgttaatcaaacaactctacctacatctgtggcgtttgagctatatgcaaagagaaatattcgcacactgccaaacaaccgtattttgaaaggtttaggtgtagacgtaaccaatggatttgtaatttgggattatgctaaccaaacaccattgtatcgtaataccgtcaaggtatgtgcatatacagatattgagccaaatggcctagtagttctgtatgatgatagatatggtgattaccagtcttttcttgctgctgataatgctgttctagtttctacacagtgttataagcgatattcatacgtagaaataccatctaatttgctcgttcagaatggtatgccattaaaagatggagcgaacctgtatgtttataagcgtgttaatggtgcgtttgttacactacctaacacaataaacacccagggtcgaagttatgaaacttttgaacctcgtagtgacattgagcgtgattttctcgctatgtcagaggagagttttgtagaaaggtatggtaaagacttaggcctacaacacatactgtatggtgaagttgataagccccaattaggtggtttacacactgttataggtatgtacagactcttacgtgcgaataagttgaacgcaaagtctgtaactaattcggattctgatgtcatgcaaaattactttgtattgtcggacaatggttcttacaagcaagtgtgtactgttgtggatttactgcttgatgatttcttagaacttcttagaaacatacttaaggagtatggtactaataagtcaaaagttgtaacagtgtcaattgattaccatagcataaattttatgacttggtttgaagatggcagtattaaaacatgttatccacagcttcaatcagcatggacgtgtggttataatatgcctgaactttataaagttcagaattgtgttatggaaccttgcaacattcctaattatggtgttggaataacgttgcctagcggtattcttatgaatgtggcaaagtatacacaactttgtcaatacctttcgaaaacaacaatttgtgtaccgcataacatgcgagtaatgcatttcggagcaggaagcgacaaaggagtggcgccaggtagtactgttcttaaacaatggctcccagaagggacactccttgtcgataatgatattgtagactatgtgtctgatgcacatgtttctgtgctttcagattgcaataaatataatacagagcacaagtttgatcttgtgatatctgatatgtatacagataatgattcaaaaagaaagcatgaaggcgtgatagccaataatggcaatgatgacgttttcatatatctctcaagttttcttcgtaacaatttggctctaggtggtagttttgctgtaaaagtgacagagacaagttggcacgaagttttatatgacattgcacaggattgtgcatggtggacaatgttttgtacagcagtgaatgcctcttcttcagaagcattcttgattggtgttaattatttgggtgcaagtgaaaaggttaaggttagtggaaaaacgctgcacgcaaattatatattttggaggaattgtaattatttacaaacctctgcttatagtatatttgacgttgctaagtttgatttgagattgaaagcaacgccagttgttaatttgaaaactgaacaaaagacagacttagtctttaatttaattaagtgtggtaagttactggtaagagatgttggtaacacctcttttactagtgactcttttgtgtgcactatgtagtgctgttttgtatgacagtagttcttacgtttactactaccaaagtgccttcagaccacctagtggttggcatttacaagggg

SEQ ID NO: 17 - DNA, 27635 bp, Coronavirus
acttaagatagatattaatatatatctattacactagccttgcgctagatttttaacttaacaaaacggacttaaatacctacagctggtcctcataggtgttccattgcagtgcactttagtgccctggatggcacctggccacctgtcaggtttttgttattaaaatcttattgttgctggtatcactgcttgttttgccgtgtctcactttatacatctgttgcttgggctacctagtgtccagcgtcctacgggcgtcgtggctggttcgagtgcgaggaacctctggttcatctagcggtaggcgggtgtgtggaagtagcacttcagacgtaccggttctgttgtgtgaaatacggggtcacctccccccacatacctctaagggcttttgagcctagcgttgggctacgttctcgcataaggtcggctatacgacgtttgtagggggtagtgccaaacaacccctgaggtgacaggttctggtggtgtttagtgagcagacatacaatagacagtgacaacatggcttcaagcctaaaacagggagtatctcccaaaccacgggatgtcattcttgtgtccaaagacatccctgaacaactttgtgacgctttgtttttctatacgtcacataaccctaaggattacgctgatgcttttgcagttaggcagaagtttgaccgtagtctccagactgggaaacagttcaaatttgaaactgtgtgtggtctcttcctcttgaagggagttgacaaaataacacctggcgtcccagcaaaagttttaaaagccacttctaagttggcagatttagaagacatctttggtgtctctcctttagcgcggaagtaccgtgaattgttgaaaacagcgtgtcagtggtctcttactgtagaagcactggatgttcgtgcacaaactctcgatgaaatttttgaccccactgaaatactttggcttcaggtggctgcaaaaattcatgtttcatctatggcaatgcgcaggcttgttggagaagtaactgcaaaagtcatggatgctctgggctcaaacttgagtgctctttttcaaattgttaaacaacaaatagccagaatctttcaaaaggcactggctatttttgagaatgtgaatgaattaccacagcgtattgcagcacttaagatggcttttgccaagtgtgctaggtcaattactgttgtggttgttgaaagaactctagttgttaaagagttcgcaggaacttgtcttgcaagcattaatggtgctgtcgcaaaattctttgaagagttgccaaacggcttcatgggttctaagattttcacaacacttgccttctttaaagaggcagctgtgagagttgtggagaacataccaaatgcaccgagaggtactaagggatttgaagttgttggcaatgccaaaggcacacaggtagttgtgcgcggcatgcgaaatgacttaacattgcttgaccaaaaagctgatattcctgttgaaccagaaggttggtctgcaattttggatggacatctttgctatgtctttaggagtggtgatcgcttttatgctgcacctctttcaggaaattttgctttgagtgatgttcattgctgtgagcgtgtagtctgtctatctgatggtgtaacaccggagataaatgatggactcattctagctgcaatctactcttcttttagtgtctctgagcttgtaacagctcttaaaaagggtgaaccattcaagttcttgggccataaattcgtgtatgcgaaggatgcagcagtgtcttttactttagcgaaggctgccactattgcagatgtcttgaggctgtttcaatcagctcgtgtgatagcagaagatgtttggtcttcatttactgaaaagtcttttgaattctggaagcttgcatatggaaaagtgcgcaaccttgaagaatttgtgaagacctatgtttgtaaggctcaaatgtcgattgtgattctagcagcagtgcttggagaggacatttggcatcttgtctcacaagtcatctataaattaggtgttctttttactaaagtcgttgacttttgtgacaaacactggaaaggtttttgtgtacagttgaaaagagctaagctcattgtcaccgaaaccttctgtgttttaaaaggagttgcacagcattgttttcaactgctgctagatgcaatacactctttgtacaagagttttaagaagtgtgcacttggtagaatccatggagatttgctcttctggaaaggaggtgtgcataaaattgttcaagatggcgatgaaatatggtttgacgccattgatagtgttgatgttgaagatctgggtgttgttcaggaaaaatcgattgattttgaggtttgcgatgacgtgacacttccagaaaaccaacctggtcatatggttcaaatagaggatgatggtaagaactacatgttcttccgttttaaaaaggatgagaacatttattatacaccaatgtctcaacttggtgctattaatgtggtttgcaaagcaggcggtaagactgtcacctttggagaaactacagtacaagagataccaccacctgatgtcgtgcctattaaggttagcatagaatgttgtggtgaaccatggaatacgatcttcaagaaggcttataaagagcctatagaagtagatacagacctcacagtagaacaattgctctctgtgatctatgagaaaatgtgtgacgaccttaaattgtttccagaggcaccagagcctccaccatttgagaatgtcgcacttgttgataagaacggtaaagatttggattgtataaaatcttgccatttgatctatcgtgactatgagagcgatgatgacatcgaggaggaagatgctgaggagtgtgacacagactcaggtgaagctgaggagtgtgacactaattcagaatgtgaagaagaggatgaggatactaaagtgttggctcttatacaagacccggcaagtattaaataccctctgcctcttgatgaagattatagcgtctataatggatgtattgtacacaaggacgctcttgatgttgtgaatttaccatctggtgaagaaacttttgttgtcaataactgttttgagggagctgttaaaccacttccacagaaggtagttgatgttcttggtgactggggagaggctgttgatgcgcaagaacaactgtgtcaacaagagcctctgcaacatacctttgaagaaccagtcgaaaattctactggtagttctaagacaatgactgaacaagtcgttgtagaagatcaagaactacctgttgttgaacaagatcaggatgtagttgtttatacacctacagatcttgaagttgcaaaagaaacagcagaagaggttgatgagtttattctcatttttgctgttcctaaagaagaagttgtgtcccagaaagatggggcacagattaaacaagagcctattcaagttgttaaaccacaacgtgagaagaaggctaaaaagttcaaagttaaaccagccacatgtgagaaacctaaatttttggagtataaaacatgtgtgggtgatttgactgttgtaattgccaaagcattggatgagtttaaagagttctgcattgtaaatgctgcaaatgagcatatgactcatggtagtggcgttgcaaaggcaattgcagacttttgtggactggattttgttgaatattgtgaggactatgttaagaaacatgggccacaacagagacttgttacaccttcgtttgtcaaaggcattcaatgtgtgaataatgttgtaggaccccgccatggagacaacaacttgcatgagaagcttgttgctgcctacaagaatgtgcttgtagatggcgtagtcaattatgttgtgccagttctttcattaggaatttttggtgtagattttaaaatgtcaatagacgcaatgcgtgaagcttttgaaggttgcaccatacgcgttcttttgttttctctgagccaagaacacatcgattatttcgatgtaacttgcaaacagaagacaatttatcttacggaggatggtgttaaataccgctccattgttctaaaacctggtgactcattgggtcaatttggacaggtttatgctaaaaacaagatagtttttacagccgatgatgttgaggacaaagaaattctctacgtccccacgactgataaaagcattcttgaatactatggtttagatgcgcaaaagtatgtaatatatttgcaaacgcttgcgcagaaatggaatgtccaatatagggacaattttcttatactagagtggcgcgatggaaattgttggattagttcagcaatagttctccttcaagctgctaaaattaggtttaaaggttttctaacagaagcgtgggctaaactgttaggtggagatcctacagactttgttgcctggtgttatgcaagttgtactgctaaagtaggtgatttctcagatgctaattggcttttagcgaatttagcagaacattttgacgcagattacacaaatgcgtttcttaagaagcgcgtttcgtgtaactgtggtattaagagctatgagcttagaggccttgaagcttgtattcagccagttcgggcaactaatctgctacattttaagacgcaatattcaaattgcccaacctgtggcgcaaataatacggatgaagtaatagaagcttcgttaccgtacttattgctttttgctactgatggtcctgctacagttgattgtgatgaagatgctgtggggactgtcgtgtttgttggttctactaatagtggccattgttatacacaagctgcagggcaagcttttgataatcttgctaaagatagaaaatttggaaagaagtcgccttacattactgcaatgtatacgcgattcgcttttaagaatgaaacctctttgcctgttgctaaacagagcaagggtaagtctaagtcggtaaaggaagatgtttctaaccttgctactagttctaaggccagttttgataatcttactgacttcgaacagtggtatgatagtaacatctatgaaagtcttaaagtgcaggaatcacctgataactttgataaatatgtgtcattcacaacaaaggaagattctaagttgccattgacacttaaggttagaggtattaaatcagttgttgactttagatcgaaggatggttttatttataagttaacacctgatactgatgaaaattcaaaagcaccagtctactacccagtcttggacgctattagtcttaaggcaatatgggtggaaggtaatgctaactttgttgttggtcatccaaattattatagtaagtctcttcatattcctactttttgggaaaatgctgagaattttgttaaaatgggtgataaaattggtggtgtaactatgggactttggcgtgcagaacaccttaataaacctaatttggagagaattttcaacattgctaagaaagccattgttggatctagtgttgttactacacaatgcggtaaattaataggtaaagcagctacattcattgctgataaagtaggtggtggtgtagttcgcaatattacagatagcattaagggtctttgtggaattacacgagggcattttgaaagaaaaatgtctccacaattcctaaagacgcttatgttctttttattctatttcttgaaggctagtgttaagagtgttgtcgctagctataagaccgtgttatgtaaggtggtacttgctactttacttatagtttggtttgtctacacaagtaacccagtaatgtttacaggaatacgtgtgttagattttctattcgagggttctttgtgtggtccttataaagactatggtaaagattcttttgatgtgttacgatattgtgcagatgattttatttgtcgtgtgtgtttacatgacaaagattcacttcatttgtacaaacacgcttatagtgtagagcaggtctataaagatgcagcttctggttttatttttaattggaattggctttatttggtctttctaatattatttgttaaaccagtggcaggttttgttattatttgctattgtgttaagtatttggtattgaattcaactgtgctgcaaactggtgtttgttttttagattggtttgtacaaacagtttttagtcactttaattttatgggagcagggttttatttctggctcttttacaagatatatatacaggtgcatcatatactgtattgtaaggatgtaacatgtgaagtgtgcaaaagggttgcacgcagcaacaggcaagaggttagcgtggttgttggtggacgcaagcagatagtgcatgtttacactaactctggctataacttttgtaagagacataattggtattgtagaaattgtgatgattatggtcaccaaaatacatttatgtctcctgaagttgctggcgagctctctgaaaagcttaagcgccatgttaaacctacagcatacgcttaccacgttgtggatgaggcatgcttagttgatgattttgtcaatttaaaatataaagctgcaactcctggtaaggatagtgcatcttcagctgttaagtgtttcagtgttacagatttcttgaagaaagctgtttttcttaaggaagcactgaaatgtgaacaaatatctaatgatggttttatagtgtgtaatacacagagtgctcatgcattagaggaagcaaagaatgcagccatctattatgcgcaatatctgtgtaagccaatacttatacttgaccaggcactttatgagcaattagtagtagagcctgtgtctaagagtgttatagataaagtgtgtagcattttgtctagtataatatctgtagatactgcagctttaaattataaggcaggcacacttcgtgatgctctgctttctattactaaagacgaagaggccgtagatatggctatattctgtcataatcatgatgtggattacactggtgatggttttactaatgtgataccgtcatatggtatagacactggcaagttaacacctcgtgatagagggtttttgataaatgcagatgcttctattgctaacttaagagttaaaaatgctccgccggtagtatggaagttttctgagcttattaagttgtctgacagttgtcttaaatatttaatttcggctactgttaagtcaggtgttcgtttctttataacaaagtctggtgctaaacaagttattgcttgtcatacacagaagttgttagtagagaaaaaggcaggtggtattgttagcggcacctttaagtgttttaagagttattttaaatggctcttgatcttttacatactttttacagcatgttgttcgggttattactatatggaggtgagtaaaagttttgttcaccccatgtatgatgtaaactccacactgcatgttgaaggttttaaagttatagataaaggtgttcttagggaaattgtaccagaagatacatgtttctctaataaatttgttaattttgatgctttttggggcagaccatatgataatagtagaaactgtccaattgtcacagctgttatagatggtgatgggacagtagctacaggtgttcctggttttgtgtcctgggttatggatggtgttatgtttatacatatgacacagactgagagaaaaccgtggtacattcctacttggtttaatagagaaattgtcggttacactcaggattcaattattactgagggtagtttttatacatctatagcgttattttccgctaggtgtttatatttaacagccagcaatacacctcaattgtattgctttaatggtgataatgatgcacctggggctttgccatttggtagtattattcctcatagagtttatttccaacccaatggtgttaggcttatagttccacaacaaatactgcacacaccctacgtagtaaagtttgtatcagacagctattgtaggggtagtgtgtgtgagtacactagaccaggttactgtgtgtcattaaacccacaatgggttttgtttaatgacgaatacacaagtaaacccggtgttttctgtggttctactgttagagaacttatgtttagtatggttagtacattctttactggtgttaaccccaatatctatatgcaattagcaactatgtttttaatactagttgttgttgtattaatctttgcaatggttataaagtttcaaggtgtttttaaagcttatgcaaccactgtttttataacaatgttagtttgggtaattaacgcatttattttgtgtgtacatagttacaacagtgttttagctgttatattactagtactctattgctatgcgtcattggttacaagtcgcaatactgttataataatgcattgttggcttgtttttacctttggtttaatagtacccacatggttggcttgttgctacctgggatttattatttatatgtatacaccgttgtttttatggtgttatggtactacaaaaaacactcgtaagctgtatgatggcaatgagtttgttggtaattatgatcttgctgcgaagagcacttttgttattcgcggctctgaatttgttaagcttactaatgagataggtgataaatttgaggcctacctttcagcgtatgctagattaaagtactattcaggcactggcagtgaacaagattatttgcaagcttgtcgtgcatggttagcttatgctttggaccaatatagaaatagtggtgtggaaattgtttatactccgccacgttactctattggtgttagtagattacaatctggttttaagaaactggtttctcctagtagtgctgttgaaaagtgcattgttagtgtctcttatagaggtaataatcttaatggactgtggctaggtgacactatctactgtcctcgtcatgtattgggtaagttttcaggtgaccaatggaatgatgtacttaatcttgctaataatcatgagtttgaagttacaactcaacatggtgttactttgaatgttgtcagtaggcgtttaaaaggtgcagttttaattttacaaactgctgttgctaatgctgaaactccaaagtataagtttattaaagctaattgtggtgatagtttcactatagcttgtgcttatggtggtacagttgtaggactctaccctgttactatgcgttctaatggtactattagagcatcttttcttgcgggagcctgtggttcagttggttttaatatagaaaagggtgtagttaatttcttttatatgcaccatcttgagttacctaatgcattacacactggaactgacctaatgggtgaattctatggtggttatgttgatgaagaggttgcacaaagagtgccaccagataatttagttactaacaatattgtagcatggctctatgcggcaattattagtgttaaggagagtagtttctcgctgcctaaatggttggagagtactactgttagtgttgatgattataataagtgggctggtgacaatggttttacaccattttctactagtaccgctattactaaattaagtgctataactggagttgatgtttgtaagctccttcgcactattatggtaaaaaatagccagtggggtggtgaccccattttagggcaatataattttgaagatgaattgacaccggagtctgtatttaatcagattggtggtgttagattacaatcttcttttgtaagaaaagctacatcttggttttggagtagatgtgtgttagcttgcttcttatttgtgttgtgtgctattgtcttgtttacggcagtgccacttaaattttatgtatatgcagctgttattttgttaatggctgtactttttatttcttttactgttaaacatgttatggcatatatggatacttttctattgccaacattgattacagttattattggagtttgtgctgaagtgcctttcatctacaatactctaattagtcaagttgttattttcttaagtcaatggtatgacccagtagtctttgatactatggtaccatggatgttcttgccactagtgttgtatactgcttttaagtgtgtacaaggttgctatatgaattctttcaatacttctttgttaatgctgtatcagtttgtgaagttaggttttgttatttacacctcttctaatactcttactgcatacacagaaggtaattgggagttattcttcgagttggtgcacactactgtgttggctaatgttagtagtaattctttaattggtttatttgtttttaagtgtgctaaatggatgttgtattattgtaatgcaacatacttaaacaattatgtactaatggcagttatggttaactgcattggctggctctgcacttgttactttgggttgtattggtgggttaataaggtttttggtttaaccttaggtaaatacaattttaaagtttcagtagatcaatataggtatatgtgtttgcacaagataaacccacctaaaactgtgtgggaagtcttttcgacaaatatacttatacaaggaattggtggtgaccgtgtgttgcctattgctacagttcaagctaaattgagtgatgtaaagtgtacaactgttgttttaatgcagcttttgactaagcttaatgttgaagcaaattcaaaaatgcatgtttatcttgttgagttacacaataaaattcttgcttctgatgatgttggagagtgcatggataatttgttgggtatgcttataacactattttgtatagattctactattgatttgagtgagtattgtgatgacatacttaagaggtcaactgtattacaatcggttactcaagaattctcacatataccctcttatgctgaatatgaaagggctaagaatctttatgaaaaggttttagttgattctaaaaatggtggtgttacacagcaagagcttgctgcatatcgtaaagctgccaatattgcaaagtcagtttttgatagagacttggctgtccaaaagaagttagatagcatggcagagcgtgctatgacaacaatgtataaagaggcgcgtgtaacagatagacgagcaaaattagtctcatcactacatgcgttacttttctcaatgcttaagaaaatagattctgaaaagcttaatgtcttgtttgaccaggctagtagtggtgttgtgcccctagcgactgttccaattgtttgtagtaataagcttacacttgtaataccagacccagaaacgtgggtcaagtgtgtggaaggtgtgcatgttacatattcaacagttgtttggaatatagacactgttattgatgccgatggcacagagttacacccaacttctacaggtagtggattgacatactgtataagtggtgctaatatagcatggcctttaaaggttaacttgactaggaatgggcataataaggttgatgttgttttgcaaaataatgagcttatgccacatggtgttaaaacaaaggcttgcgtagcaggtgtagatcaagcacattgtagcgtagagtctaaatgttattatacaaatattagtggcaattcagttgtagctgctattacttcttcaaatccaaatctgaaagtagcttcgtttttgaatgaggcaggcaatcagatttatgtagacttagacccaccatgtaaatttggcatgaaagtgggtgtcaaggttgaggttgtttacttgtattttataaagaatacaaggtcgattgttaggggtatggtacttggtgctatatctaatgttgttgtcttacagtctaaagggcatgaaacagaggaagtggatgctgttggcattctttcactatgttcatttgcagtagatcccgcggacacatattgtaaatatgtggcagcaggtaatcaacctttaggtaactgtgttaaaatgttgacagtgcataatggtagtggttttgctataacttcaaagccaagtcctactcctgaccaggattcttatggaggagcttctgtgtgtctctattgtagagcacacatagcacatccaggaagtgtaggaaatttagatggacgttgtcaatttaaaggttcttttgtgcaaatacctactacggagaaagaccccgttggattctgtctacgtaataaggtttgcactgtttgccagtgttggattggttatggatgtcagtgtgattcacttagacaaccaaaatcttctgttcaatcagttgctggagcatctgattttgataagaattatttaaacgggtacggggtagcagtgaggctcggctgataccccttgctagtggatgtgatcctgatgttgtaaagcgagcctttgatgtttgtaataaggaatcagctggtatgtttcaaaatttgaagcgtaactgcgctagattccaggaactacgcgatactgaagatggaaatcttgagtatcttgattcttactttgtagttaaacaaaccactcctagtaattatgaacatgaaaaatcttgttacgaagacttaaagtcagaagtaacagctgaccatgacttctttgtgttcaataagaacatttacaatattagtaggcaacggcttactaaatatactatgatggacttctgctatgctttgagacatttcgacccaaaggattgtgaagttcttaaagaaatacttgtcacttatggttgtatagaagactatcaccctaagtggtttgaggagaataaggattggtacgacccaatagaaaactcaaaatattatgtcatgttggctaaaatgggacctattgtacgacgtgctttattgaatgctattgagttcggaaaccttatggttgaaaaaggttatgttggtgttattacactcgataaccaagaccttaatggcaaattttatgattttggtgattttcagaagacggcacctggtgctggtgttcctgtttttgatacgtattattcttacatgatgcccatcatagccatgacggatgctttagcacctgagaggtactttgaatatgatgtgcacaagggttataaatcttatgatctcctcaagtatgattatactgaggagaaacaagaattgtttcagaagtactttaagtactgggatcaagagtatcatcctaactgccgtgactgtagtgatgacaggtgtttgatacattgtgcaaacttcaatatcttgttttctacacttataccgcagacttctttcggtaatttgtgtagaaaagtttttgttgatggtgtaccatttatagctacttgtggctatcattctaaggaacttggtgttattatgaatcaagataacaccatgtctttttcaaaaatgggtttaagtcaactcatgcagtttgttggagatcctgctttgttagtgggaacatccaataatttagttgatcttagaacgtcttgttttagtgtttgtgcgttaacatctggtattactcatcaaacggtaaagccaggtcactttaacaaggatttctatgattttgcagagaaggctggtatgtttaaggagggttcgtctataccacttaaacattttttctatcctcaaactggtaatgctgctataaacgattatgattattatcgttataacaggcctaccatgtttgacatatgtcaacttctattttgtttagaagtgacttctaaatactttgagtgttatgaaggcggctgtataccagctagccaagttgtagttaacaacttagataagagtgcaggctatccatttaataagtttggaaaagcccgcctctattatgaaatgagtctagaggaacaggaccaactcttcgagattacgaagaagaatgtcctacccactataactcaaatgaatttaaaatatgccatatccgcgaaaaatagagcgcgtacagtggcaggtgtgtctatcctttctactatgactaataggcagtttcatcagaagattcttaagtctatagtcaacactagaaatgcttctgtagttattggaacaaccaagttttatggcggttgggacaacatgttgagaaacctgattcagggtgttgaagacccaattcttatgggttgggattatcctaagtgtgatagagcaatgcctaatttgttgcgtatagcagcatccttagtacttgctcgcaaacacactaactgttgtagttggtctgaacgcatttataggttgtataatgaatgcgcccaggtcttatctgaaactgtacttgctacaggtggtatttatgttaaacctggtggcactagcagtggtgatgctactactgcttatgcaaacagtgtttttaacataatacaagccacatctgctaatgttgcgcgtcttttgagtgttataacgcgtgatattgtctatgataatattaagagcttgcagtatgaattgtatcagcaggtctacaggcgagttaattttgacccagcctttgttgaaaagttttattcttacttatgtaagaatttttcgttgatgatcttgtctgacgacggtgttgtttgttacaacaacacattagccaaacaaggtcttgtagcagatatttctggttttagagaggttctctactatcagaataatgtttttatggctgattctaaatgttgggttgaaccagatttagaaaaaggcccacatgagttttgttcacaacacacaatgctagtggaggttgatggtgagcctaagtatttgccatacccagacccttcacgcattttgggtgcatgtgtttttgtagatgacgtggataagacagaacctgtggctgttatggagcgttatatagctcttgccatagatgcttatccactagtacatcatgaaaatgaagagtacaagaaggtattctttgttctccttgcatatatcagaaaactctatcaagagctttctcagaatatgcttatggactactcttttgtaatggatatagacaagggtagtaaattttgggaacaggagttctatgagaatatgtatagagctcctacgactttacaatcttgtggcgtttgtgtagtttgtaatagtcaaactatactacgctgcggtaattgtattcgtaaaccgtttttgtgttgtaagtgttgctatgaccacgtcatgcatacggaccacaaaaatgttttatctataaatccttatatttgctcacagctaggttgcggtgaagcagatgttactaaattgtacctcgggggtatgtcgtacttctgtggtaatcataaaccgaaattgtcaataccgttagtatctaatggtactgtttttggaatttacagggctaattgtgctggtagtgaaaatgttgatgattttaatcaactagctactactaattggtccattgtcgaaccttatattttagcaaatcgctgtagtgattcattgagacgttttgctgcagagacagtaaaagccacagaagaattacataagcaacaatttgctagtgcagaagtgcgagaagtattctcagatcgtgaattgattctatcatgggaaccaggaaaaaccaggccgccattgaatagaaattatgttttcacaggttatcactttacaagaactagtaaggtgcagcttggtgattttacatttgaaaaaggtgaaggtaaggatgttgtctattataaagcaacgtctactgctaaattgtctgtaggagacatttttgttttaacctcacacaatgttgtttctctcgtagcgccaacattgtgtccacaacaaaccttttctaggtttgtaaatttaagacctaatgtaatggtacctgaatgttttgtaaataacattccactttaccatttagtaggtaaacagaagcgtactacagtacaaggtcctcctggcagtggtaaatcccactttgctataggccttgcagtatactttagtagcgctcgtgttgtttttactgcatgttctcatgcagctgttgatgctttatgtgaaaaagcttttaagtttcttaaagttgatgattgcactcgtatagtaccccaaaggactactgtcgattgcttctcaaaatttaaagctaatgacacaggcaaaaagtacatttttagtactattaatgccttgccggaagttagttgtgatattcttttggttgacgaggttagtatgttgaccaattacgaattgtcctttattaatggtaagataaattaccaatatgttgtgtatgtaggtgatccggctcaattaccggcaccccgcactttacttaatggttcactttctccaaaggattataatgttgtcacaaaccttatggtttgtgttaaacctgatattttccttgcaaagtgttatcgttgtcctaaggaaattgtagacactgtgtctactcttgtttatgatggaaagtttattgcaaataacccagaatcacgtgagtgtttcaaggttatagttaataatggcaattctgatgtaggacatgaaagtggttcagcctacaacacaacacaattggaatttgtgaaagactttgtttgtcgcaataaacaatggcgggaagcaatatttatttcaccttacaatgctatgaaccagagagcttaccgtatgcttggacttaatgttcaaacagtagattcttctcaaggttcagagtatgattatgtcatcttctgtgttactgcagattcgcagcatgcactgaatattaatagatttaatgtggcgcttacaagagctaagcgtggtatactagttgtcatgcgccagcgtgatgaattgtattctgctcttaagtttacagagctagatagtgaaacaagtctgcaaggtacaggtttgtttaaaatttgcaacaaagaatttagtggtgtccatcctgcttatgcagtcacaactaaggctcttgctgcaacctataaagttaatgatgaacttgctgcacttgttaatgtggaagctggttcagaaataacatataaacatcttatttctctgttaggattcaagatgagtgttaatgttgaaggctgccacaacatgtttataacacgtgatgaggcaatccgcaatgtaagaggttgggtaggttttgatgtagaagcaacacatgcttgtggcactaacattggtactaacctgccttttcaagtaggtttctctactggtgcagactttgtagtcacgcctgagggacttgtagatacttcaataggcaataattttgagcctgtgaattctaaagcacctccaggtgaacaatttaaccacttgagagtgttatttaaaagtgctaaaccttggcatgttataagaccaaggatagtgcagatgttagcagacaatctatgcaacgtttcagattgtgtagtgtttgtcacatggtgtcatggcctagaactaactactttgcgctattttgttaaaataggcaaggaacaagtttgttcttgtggttctagagctacaacttttaattctcatactcaagcttatgcttgttggaagcattgtttgggttttgattttgtttataacccacttctagtggatattcaacagtggggttactcgggtaacctacagtttaatcatgatttgcactgtaatgtgcatggccacgctcatgtagcttctgttgacgctataatgactcgttgtcttgcaattaacaatgcattttgtcaagatgtcaactgggatttgacataccctcacattgcaaatgaggatgaagtcaattctagttgtagatatctacaacgcatgtatcttaatgcgtgtgttgatgctcttaaagttaatgttgtctatgatataggcaaccctaaaggtattaaatgtgttaggcgtggggatgttaattttagattctatgataagaatccaatagtacgcaacgtcaagcagtttgagtatgactataatcagcacaaagataagtttgctgatggtctttgtatgttttggaattgtaatgtggattgttatcctgataattccttggtttgtaggtatgacacacgaaatttgagtgtgtttaacctaccaggctgtaatggtggtagtctgtacgttaacaaacatgcattctacacacctaaatttgaccgcattagcttccgcaatttgaaagctatgccattctttttttatgactcatcgccttgtgaaaccattcaagtggatggagttgcgcaagaccttgtgtctctagctacgaaagactgtatcacaaagtgcaacattggtggcgctgtttgtaagaaacatgcccagatgtatgcagaatttgtgacttcttacaatgcagctgtcacagctggctttactttctgggtaactaataaacttaacccttataacttatggaaaagtttttcagctctccagtctatcgacaatattgcttataatatgtataagggtggtcattatgatgctattgctggagaaatgcccactgtcataactggagacaaagtttttgttattgatcaaggtgtagaaaaggcagtttttgttaatcaaacaactctacctacatctgtggcgtttgagctatatgcaaagagaaatattcgcacactgccaaacaaccgtattttgaaaggtttaggtgtagacgtaaccaatggatttgtaatttgggattatgctaaccaaacaccattgtatcgtaataccgtcaaggtatgtgcatatacagatattgagccaaatggcctagtagttctgtatgatgatagatatggtgattaccagtcttttcttgctgctgataatgctgttctagtttctacacagtgttataagcgatattcatacgtagaaataccatctaatttgctcgttcagaatggtatgccattaaaagatggagcgaacctgtatgtttataagcgtgttaatggtgcgtttgttacactacctaacacaataaacacccagggtcgaagttatgaaacttttgaacctcgtagtgacattgagcgtgattttctcgctatgtcagaggagagttttgtagaaaggtatggtaaagacttaggcctacaacacatactgtatggtgaagttgataagccccaattaggtggtttacacactgttataggtatgtacagactcttacgtgcgaataagttgaacgcaaagtctgtaactaattcggattctgatgtcatgcaaaattactttgtattgtcggacaatggttcttacaagcaagtgtgtactgttgtggatttactgcttgatgatttcttagaacttcttagaaacatacttaaggagtatggtactaataagtcaaaagttgtaacagtgtcaattgattaccatagcataaattttatgacttggtttgaagatggcagtattaaaacatgttatccacagcttcaatcagcatggacgtgtggttataatatgcctgaactttataaagttcagaattgtgttatggaaccttgcaacattcctaattatggtgttggaataacgttgcctagcggtattcttatgaatgtggcaaagtatacacaactttgtcaataccttttgaaaacaacaatttgtgtaccgcataacatgcgagtaatgcatttcggagcaggaagcgacaaaggagtggcgccaggtagtactgttcttaaacaatggctcccagaagggacactccttgtcgataatgatattgtagactatgtgtctgatgcacatgtttctgtgctttcagattgcaataaatataatacagagcacaagtttgatcttgtgatatctgatatgtatacagataatgattcaaaaagaaagcatgaaggcgtgatagccaataatggcaatgatgacgttttcatatatctctcaagttttcttcgtaacaatttggctctaggtggtagttttgctgtaaaagtgacagagacaagttggcacgaagttttatatgacattgcacaggattgtgcatggtggacaatgttttgtacagcagtgaatgcctcttcttcagaagcattcttgattggtgttaattatttgggtgcaagtgaaaaggttaaggttagtggaaaaacgctgcacgcaaattatatattttggaggaattgtaattatttacaaacctctgcttatagtatatttgacgttgctaagtttgatttgagattgaaagcaacgccagttgttaatttgaaaactgaacaaaagacagacttagtctttaatttaattaagtgtggtaagttactggtaagagatgttggtaacacctcttttactagtgactcttttgtgtgcactatgtagtgctgttttgtatgacagtagttcttacgtttactactaccaaagtgccttcagaccacctagtggttggcatttacaagggggtgcttatgcggtagttaacatttctagcgaatttaataatgcaggctcttcatcagggtgtactgttggtattattcatggtggtcgtgttgttaatgcttcttctatagctatgacggcaccgtcatcaggtatggcttggtctagcagtcagttttgtactgcacactgtaatttttcagatactacagtgtttgttacacattgttataaacatggtgggtgtcctttaactggcatgcttcaacagaatcttatacgtgtttctgctatgaaaaatggccagcttttctataatttaacagttagtgtagctaagtaccctacttttagatcatttcagtgtgttaataatttaacatccgtatatttaaatggtgatcttgtttacacctctaatgagaccatagatgttacatctgcaggtgtttattttaaagctggtggacctataacttataaagttatgagagaagttaaagccctggcttattttgttaatggtactgcacaagatgttattttgtgtgatggatcacctagaggcttgttagcatgccagtataatactggcaatttttcagatggcttttatccttttactaatagtagtttagttaagcagaagtttattgtctatcgtgaaaatagtgttaatactacttgtacgttacacaatttcatttttcataatgagactggcgccaaccctaatcctagtggtgttcagaatattcaaacttaccaaacaaaaacagctcagagtggttattataattttaatttttcctttctgagtagttttgtttataaggagtctaattttatgtatggatcttatcacccaagttgtaaatttagactagaaactattaataatggcttgtggtttaattcactttcagtttcaattgcttacggtcctcttcaaggtggttgcaagcaatctgtctttaaaggtagagcaacttgttgttatgcttattcatatggaggtccttcgctgtgtaaaggtgtttattcaggtgagttagatcataattttgaatgtggactgttagtttatgttactaagagcggtggctctcgtatacaaacagccactgaaccgccagttataactcaaaacaattataataatattactttaaatacttgtgttgattataatatatatggcagaactggccaaggttttattactaatgtgaccgactcagctgttagttataattatctagcagacgcaggtttggctattttagatacatctggttccatagacatctttgttgtacaaggtgaatatggtcttaattattataaggttaacccttgcgaagatgtcaaccagcagtttgtagtttctggtggtaaattagtaggtattcttacttcacgtaatgagactggttctcagcttcttgagaaccagttttacatcaaaatcactaatggaacacgtcgttttagacgttctattactgaaaatgttgcaaattgcccttatgttagttatggtaagttttgtataaaacctgatggctcaattgccacaatagtaccaaaacaattggaacagtttgtggcacctttatttaatgttactgaaaatgtgctcatacctaacagtttcaacttaactgttacagatgagtacatacaaacgcgtatggataaggtccaaattaattgcctgcagtatgtttgtggcagttctctggattgtagaaagttgtttcaacaatatgggcctgtttgcgacaacatattgtctgtagtaaatagtgttggtcaaaaagaagatatggaacttttgaatttctattcttctactaaaccggctggttttaatacaccagttcttagtaatgttagcactggtgagtttaatatttctcttctgttaacaaatcctagtagtcgtagaaagcgttctcttattgaagaccttctatttacaagcgttgaatctgttggactaccaacaaatgacgcatataaaaattgcactgcaggacctttaggcttttttaaggaccttgcgtgtgctcgtgaatataatggtttgcttgtgttgcctcctatcataacagcagaaatgcaagctttgtatactagttctctagtagcttctatggcttttggtggtattactgcagctggtgctataccttttgccacacaactgcaggctagaattaatcacttgggtattacccagtcacttttgttgaagaatcaagaaaaaattgctgcttcctttaataaggccattggtcatatgcaggaaggttttagaagtacatctctagcattacaacaaattcaagatgttgttagtaaacagagtgctattcttactgagactatggcatcacttaataaaaattttggtgctatttcttctgtgattcaagaaatctaccagcaatttgacgccatacaagcaaatgctcaagtggatcgtcttataactggtagattgtcatcactttctgttttagcatctgctaagcaggcggagtatattagagtgtcacaacagcgtgagttagctactcagaaaattaatgagtgtgttaagtcacagtctattaggtactccttttgtggtaatggacgacatgttctaaccataccgcaaaatgcacctaatggtatagtgtttatacacttttcttatactccagatagttttgttaatgttactgcaatagtgggtttttgtgtaaagccagctaatgctagtcagtatgcaatagtgcccgctaatggtaggggtatttttatacaagttaatggtagttactacatcactgcacgagatatgtatatgccaagagctattactgcaggagatgtagttacgcttacttcttgtcaagcaaattatgtaagtgtaaataagaccgtcattactacattcgtagacaatgatgattttgattttaatgacgaattgtcaaaatggtggaatgatactaagcatgagctaccagactttgacaaattcaattacacagtacctatacttgacattgatagtgaaattgatcgtattcaaggcgttatacagggtcttaatgactctctaatagaccttgaaaaactttcaatactcaaaacttatattaagtggccttggtatgtgtggttagccatagcttttgccactattatcttcatcttaatactaggatgggttttcttcatgactggttgttgtggttgttgttgtggatgctttggcattatgcctctaatgagtaagtgtggtaagaaatcttcttattacacgacttttgataacgatgtggtaactgaacaatacagacctaaaaagtctgtttgatgatccaaagtcccacgtccttcctaatagtattaattcttctttggtgtaaacttgtactaagttgttttagagagtttattatagcgctccaacaactaatacaagttttactccaaattatcaatagtaacttacagtctagactgaccctttggcacagtctagactaatgttaaacttagaagtaattattgaaactggtgagcaagtgattcaaaaaatcagtttcaatttacagcatatttcaagtgtattaaacacagaagtatttgatccctttgactattgttattacagaggaggtaatttttgggaaatagagtcagctgaagattgttcaggtgatgatgaatttattgaataagtcgctagaggagaatggaagttttctaacagcgctttacataattgtaggatttttagcactttatcttctaggtagagcacttcaagcatttgtacaggctgctgatgcttgttgtttattttggtatacatgggtagtaattccaggagctaagggtacagcctttgtatacaagtatacatatggtagaaaacttaacaatccggaattagaagcagttattgttaacgagtttcctaagaacggttggaataataaaaatccagcaaattttcaagatgcccaacgagacaaattgtactcttgactttgaacagtcagttcagctttttaaagagtataatttatttataactgcattcttgttgttcttaaccataatacttcagtatggctatgcaacaagaagtaaggttatttatacactgaaaatgatagtgttatggtgcttttggccccttaacattgcagtaggtgtaatttcatgtacatacccaccaaacacaggaggtcttgtcgcagcgataatacttacagtgtttgcgtgtctgtcttttgtaggttattggatccagagtattagactctttaagcggtgtaggtcatggtggtcatttaatccagaatctaatgccgtaggttcaatactcctaactaatggtcaacaatgtaattttgctatagagagtgtgccaatggtgctttctccaattataaagaatggtgttctttattgtgagggtcagtggcttgctaagtgtgaaccagaccacttgcctaaagatatatttgtttgtacaccggatagacgtaatatctaccgtatggtgcagaaatatactggtgaccaaagcggaaataagaaaaggtttgctacgtttgtctatgcaaagcagtcagtagatactggcgagctagaaagtgtagcaacaggaggaagtagtctttacacataaatgtgtgtgtgtagagagtatttaaaattattctttaatagcgcctctgttttaagagcgcataagagtatttattttgaggatactaatataaatcctctttgttttatactctcctttcaagagctattaacggtgttacctttcaagtagataatggaaaagtctactacgaaggaacaccagttttccaaaaaggttgttgtaggatgtggtccaattataagaaagaataattgaaccacctactacacttatttttataagaggtgttttacttaacaaaaacttaacaaatacggacgatgaaatggctgactagttttggaagagcagttatttcttgttataaatccctactattaactcaacttagagtgttagataggttaattttagatcacggactactacgcgttttaacgtgtagtaggcgcgtgcttttagttcaattagatttagtttataggttggcgtatacgcccacccaatcgctggcatgaataatagtaaagataatccttttcgcggagcaatagcaagaaaagctcgaatttatctgagagaaggattagattgtgtttactttcttaacaaagcaggacaagcagagccttgtcccgcgtgtacctctctagtattccaagggaaaacttgtgaggaacacatacataataataatcttttgtcatggcaagcggtaaagcagctggaaaaacagacgccccagcgccagtcattaaactaggaggaccaaaaccacctaaagtcggttcttctggaaatgcatcttggtttcaagcaataaaagccaagaagttaaatacacctccgcccaagtttgaaggtagcggtgttcctgataacgaaaacattaagccaagccagcaacatggatactggagacgccaagccaggtttaagccaggcaaaggtggaagaaaaccagtcccagatgcttggtacttttactatactggaacaggacctgccgctgacctgaactggggtgatactcaagatggtatagtgtgggttgctgctaagggtgctgatactaaatctagatccaatcagggtacaagagatcctgataagtttgaccaatacccactacgattctcggatggcggacctgatggtaatttccgttgggacttcattcccctgaaccgtggtaggagtggaagatcaacagcagcttcatcagcagcagctagtagagcaccatcacgtgaaggttcgcgtggtcgtagaagtgattctggagatgaccttattgctcgtgcagcaaagataatccaggatcagcagaaaaagggctctcgcattaccaaggcaaaggcagatgaaatggctcatcgccggtattgcaagcgcactatcccacctaattatagggttgatcaagtgtttggtccccgtactaaaggtaaggaggggaattttggtgatgacaagatgaatgaggaaggtattaaggatgggcgtgttacagcaatgctcaacctagtccctagcagccatgcttgtctttttggaagtagagtgacacccaaacttcaactagatgggcttcacttgagatttgaatttactactgtggtcccatgtgatgacccgcagtttgataattatgtgaaaatttgtgatcagtgtgtcgatggtgtaggaacgcgtccaaaagatgacgaaccaaaaccaaagtcacgctcaagttcaagacctgctacaagaggaaattctccagcgccaagacaacagcgcccaaagaaggagaaaaagctaaagaagcaggatgatgaagcagataaagcattgacctcagatgaggagaggaacaatgcacagctggaattttatgatgagcccaaggtaattaactggggggatgcagctctaggggagaatgaactttgagtaacataatggacctgttgtttcctggtacattttgttaaacactatttctgtgctttcctatcaattattacaggcattgattgtgattatgttcaatacttaagcttcttttggttgctttttgcttattgtattgttgctgtgctttttattgttgtgattctcattagtttgctttatcgtagaaattcaatagtaagagttaaggaagataggcatgtagcttgattacctacatgtctatcgccagggaaatgtctaatctgtctacttagtagcctggaaacgaacggtagacccttagattttaatttagtttaatttttagtttagtttaagttagtttagagtaggtataaagatgccagtgccggggccacgcggagtacgatcgagggtacagcactaggacgcccattaggggaagagctaaattttagtttaagttaagtttaattggctaagtatagttaaaatttataggctagtatagagttagagcaaaaaaaaaaaaaaaaaaaaaaaaaaaa

SEQ ID NO: 18 - DNA, 27733 bp, Coronavirus
acttaagatagatattaatatatatctattgcactagccttgcgctagatttccaacttaacaaaacggacttaaatacctacagctggtccctataggtgttccattgcagtgcactttagtgccctggatggcacctggccacctgtcaggttttagttattaaatttttattgttgctagtatcactgcttgttttgttgtgtctcactttattacatccgttgcttgggctacctagtgccagcgtcctgcggacgccgtggtcggttcgagtgcgaggaacctctggttcatctagcggtacgcgggtgtgtggaagtagcgcttcaggcgtacgtgttcctgttgcgtgaaacacggggtcacctccccccacattcctctaagggcttttgagcctagcgttgggctacgttctcgcataaggtcggctatacgacgtttgtagggggtagtgccaaacaacccctgaggtgacaggttctggtggtgtttagtgagcagacatacaatagacagtgacaacatggctccaagcctaaaacagggagtatctccccaaaaccagaggagtgtcgttcttgttgccaaagacattcccgatcaactccgtgacgctttgtttttctatacgtcacacaacccaaaagattacgctgatgctttcgcttttaagcagaagtttgatcgtaatctgggcgctgggaagcagtttaaatttgaaactgtgtgtggtccattctttcttaaaggagtggataaagtaacaccaggggtcccagctaaagttttgaaagccacttcaaaattggctgatttagaagacatctttggtgtctcaccttttgcacggaaataccgtgaacttcttaaaacagcatgccagtggtctcttactgtagatgcgctggatgctcgtgcccaaactcttgaagaaatttttgaaccaactgaagtactttggctccaggtggcttcaaaacttcaggtttcagctatggcaatgcgcagacttgttggtgaagtaactgcaaaagtcatggatgctttgggctcaaatttgagttctctttttcaaattgtgaaacagcaaatagccagaatttttcagaaagctctggctatttttgaagatgtaaaagacttaccacaacgcatagctgcactgcagatggcttttgcaaagtgcgctaaaacaattactgttgttgttgtggaaaaagctattgttgttcgcgaattttctggaacttgtcttgcaagtattaatggtgccattgctaagttccttgcggaactacccaatggttttatgggatctaaagtttttagcacgctggctttctttaaagaggcagctgttaaaattgtagagaatgtcccaggagcaccgcaaggtactaaaggttttgaagttgttggcaatgccaaaggcacacaagttgtaattcgtggcatgcgaaatgacttaacactgcttgaccaaaaagctgagattcctgttgaaccagaaggctggtctgcaattctggatggacatctttgttatgtctttaagagtggtgacagattttatgctgcgcctttgtcaggaaactttgcacttcatgatgtgcattgctgtgaacgtgttgtctgtcttgttgatggtgttacaccggagattaatgacggactcattcttgcagcaatctactcgtcatttagtgtgtctgaaattgtggctgcacttaagaaaggtgaaccattcaagtttcttggccataagtttgtgtatgcaaaggaagctgctgtctccttcacattggcaaaagcagctactatttctgatgtcttgaagctgtttcaatctgctagagtaaagacagaggatgtgtggtctgcacttactgaaaagtcttttgaattctggaaactcgcatatggaaaagtgcgaaatcttgaggaatttgtgaagactcatttctgtaaagcccaaatgtcaattgtcgttctagcagtagtgcttggtgaaggcatttggcatcttgtttctcaagtcatctataggttgggtggtttgtttgctaaagttactgatttttgtgcaaagtactggaaaggtttctgcgaacaattgaaaaaggctaagcttcttgtcacagaacacctatgtgtcctgaaaggtgttgcacagcattgttttcaacttttgctggatgcaatacattctatgtacaagagctttcaaaaatgtgcacttggtagaatccatggagatttactcttctggaaaggaggtgtacacaaagtagttcagggaggcgacgaaatttggttcgacgccattgacagtattgatgttgaagacctgggtgtcatccaagaaaaacctgtagattttgaggtttgtgatggtataatacttccagaaaatcaacctggtcatatggtccagtttgaagatgatggaaagaactatatgttcttccgcttcaaacgtgaagacaatgtttattatacaccaatgtcacaacttggtgcaattaatgtagtttgcaaagcaggtggcaagactgtcacgtttggtgaaactactgtgaaagaaataccaccacctgatgtggtgcctattaaggttagcatcgagtgttgtggtgatccatggaatccaatcttcaagaaggcttataaagagcccattgaagtagaaacagacctcacagtagagcaattgctcactgtgatctacgagaaaatgtgtgacgacctcaaattgtttcctgaggctccagaacctccactatttgagaatgttgcacttgttgataagagcggtaaagacttggattgcataaaatcatgccatctcatttaccgcgactatgagagtgatgatgacatcgaagaggaagacgctgaggagtgcgacacagcttcagaagatgctgaggagtgtgacacaagttcagagtgtgaagaagaggatgagggtacaaaggtcttggctcttatacaagatccagcaagtcaaaagtaccccctccctcttgatgatgattacagtgtctataatggatgtatagtccataaggatgctcttgatgttgtgaatctaccatccggtgaagaaacttttgttatcaacaactgctttgagggagctgtaaaacaacttccaaagtcggttgtagatgtacttggtgactggggtgaagctgttgatgcacaggagaagtccttgaatgacgtagctgattccagtagtgtttcgttgccgattgaagagccggtaacaattcataaacaggaatttgttcctgttgtagaagaagagctagatgttatagtttgcactccagctgaattaagtgttgtaaaggaagctccaggagaggttgacgagttcatccttattccaagtgtttctaatggtgaagaagtagtttctgctgtgggtgcgccacagcaggaagaatctagagaagaagttgttcctgatattttgcaacaggaagagcctaaaattgaagagcctcctcaagttgtaaaaatacaacgtgagaggaaagctaagaagttcaaagttaagccaaccacacaaaaagttcctaattgtttggagtataaaacttgtgtgggcgatttgactgttgtgatagccaaagcattggatgagtttaaagagttctgccttgtaaacgccgcaaatgattatatgtctcacggaggtggcgttgcaaaagcaattgcagacttttgtggtccagactttgtggagtattgtgaagactatgttaagaaacatggtccccagaaaagacttgtcacaccttcttatgttaaaggcattcaatgtgtgaacaatgttgtaggcccacgccatgcagacagtgatgtgtttggaaagctagttactgcgtacaagaatgtcattgttgatggcgtagtcaattacgttgtaccagttctttcatctggaatttttggagttgactttaagttgtcaatagatgctatgcgtgtagcttttgcggattgcaacatacgcgttcttctattttctctgaaccaagagcatgtcgattatttcgacgctacttgcaaacagaagacaatctttcttacagaagatggtgttaaataccgctctgttactgttaaacctggagactctttgggtcaatttggacaggtttttacacgacataagacagtctttactgcagatgatgttgaggataaagaaattctcttcattccaactgcagacaaggctgtccttgattattatggtttggatgcgaaaaagtatgtgatatatttacatacgctttcacaaaaatggaaaatcctacttaaggacaattttattcaacttgagtggcgtgatggaaattgttggattaattcagcaatagtaatccttcaggctgctaagattaagtttaaaggttttcttgaagaagcatgggctaagctattgggtggagatcctacagatttcgtagcatggtgctatgcgagttgcaatgctaatgttggtgatttctcagacaccaactggcttttggctaatttggctgagcattttgaagtggattacacgaatgcacttcttaagaagcgtgtttcttgtaattgtggtgttaagaattatgagtttaggggccttgaagcttgtattcaaccagtaaaggcacctaacctgttacattttaagacacagtactcaaactgtctcacttgtggttctaatagtgtagatgaagtgatagaagcctcgctgccttatttgctgcttcttgctacagatggtcctgctgcagttgattgtgatgaaaatgctgtaggaaatgttgttttcattgggtccactaataggggtcattgttatacacaagctgttggaacagcttttgataatttggctcaagataggaaatttggaaagaaatcgccttacattactgcgatgtatacgcgcttctctcttaaaagtaaaaaccttatgcctattgctaagaagagcaaaggtaaaaatcaagtagtaaaagaagatgtttctaatcttgctattagttcaaaagccagttttgataatcttactgactttgagcagtggtatgatagtaacatctatgagagtcttaaagtgcaggaaacacctgacaatcttgatgaatatgtgtcatttacaacaaaggaggattccaagttgccattgacacttaaagttcgtggtgttaaatcagttgttgattttaagtcgaaagatggctttacttataaattaacacctgatattgatgaaaattcaaaggcacccgtttattaccctgtcttagactctgttagtcttaaggcaatttgggttgacggaagtgcaaactttgttgttggacatccaaattataatagtagagctttgcgaattcccactttctgggagtatgcagagagttttgttaaaatgggtgaaaaagttaatggtgttactatgggcttatggcgcacagaacaccttaataaacccaatttggaaaatcttttcaacatcgttaagaaaatggttgttggaactaatattgttactactcagtgtggtagactaattggtaagactgcatcatttatagctgataaagtaggagatggtgtagttcgtaatgttactgatagaattaaagggtgttttgggtttactagggagcactttgaaagaagagtgtctctacagttctttaaaaccctctttttcttctttttctgtcttttgaaggctagtgctaagagtttaatgtctagctacaagagtgtgctacgtaaagtggtatttactgctttacttatactatggtttgtctacacaagcaatccagttatatttactggaatacgtgtgttagatttcctacttgaaggttcattttgtagtccttatgcagattacggtaaagagtcttttgatattttacgctattgtggaagtgacttcacctgtcgagtatgtttacatggtaaggattcgcttcatttgtataaacatgcctatagcgtagaacagttatacaaagatgcagttaatggcatcagttttacatggaattggctttatatgctgttcttaatattgtttgttaagccagtggcaggttttgttattatttgctactgtataagatatttggttttaagcacaactgtattgcaaactggtgtaggatttttagactggtttattcaaacagtgtttgctaacttcaattttatgggtgcaggattttacttctggctcttttataagatatatatacaggtccatcatataatgtactgtaaggatataacatgtgaagtgtgtaagaaagttgcacgcagtaatagacatgaagttagtgttgttgttaatgggcgtaaacagcttgttcacgtatacactaattctggttacactttctgtaagaaacataattggtattgtaagaattgtgacaagtatggtcaccagaatacatttatgtctcctgaagttgctggtgagctttcagaaaagcttaaacgccatgttaaacctacagcacatgcataccacgtagtggatgatgcatgcttagttgatgactttgttaatctgaagtacaatgctgccaccccaggtaaagaaggtgtgcattctgctgttaaatgttttagtgtatctgatttcttaaagaaagcagtctttcttaaggatgcacaaaaatgtgaacaaacagccactgatagttttatagtttgtaatacacacagtgcgcatgctttggaggaagctaaaaatgctgccatctattatgcgcaatgtctttgtaaaccaattcttatacttgaccaggctctttatgaccaattgattgtagaacctgtgtccaagagtgttgtagacaaagtgtgtaatattttgtctaatataatatctgtagattctgcagctttgaattataaggcgggcacacttcgtgataccctcctttctgtcactaaggatgaagaagctgttgatatggctattttctgccataataatgacgttgaatatactactgatggttttaccaatgtggcgccatcatatggtatagacactggtaagttaacacctcgagatagaggctttttgataaatgcagatgctgccattgctaacttgaaagtgaaaaattcaccgccagtagtgtggaagtattctgatcttgttaaactgtctgacagttgtcttaagtgtttaatatcagcaactgtaaaatcaggaggtagatttttcataactaggtctggtgctaaacaagttattgcttgttatactcagaaattgttagtggaaaagaaggctggtggtgttattagtagcactgttaataggtttaagagtttatgtaaatggctcttagtgttttatttactttttacagcgtgttgtttgtgttattatcaatgggaaatgagtaaagaatttgctcaccccatgtatgatgttaactctacagtgcatgtagaagggtttaaggttattgacaagggtgtactcagggatattatgccagaagacacttgtttctctaataagtatgtaaattctgactcattttggggtaaaccttatgtaaatagtagagactgtcctattgtaaccgctattatagatggcgctggaacagtagctgctggtgttcctggttttgtacagtgggtcatggatggtgtaatgtttatccatatgacacagactgagcgaagaccgtggtacattcctacttggtttaatagagaaattgttggttatactcatgattctattgttacagaaggtgagttttatacttccatagcattgtttgcttctagatgtttgtatttaacatctagtaacacaccacagctttactgctttaatggtgatagcgatgctcctggagcattaccgtttgcaagtatactccctcatagagtatattttcaacctaatggagttaggcttattgtgcctcagcaaattatgcatacaccatacatagttagacttgtttcagatagctattgtagaggtagtgtttgtgagtatactaaaccgggttattgtgtatcactgaactcccaatgggttttgtttaatgacgaatacacaagtaaaccaggtgtgttttgtggttctactgttagagaacttttgtttagtatggttagcacattttttacgggtgttaatcctaatatctatatgcaattggcgactatgttcttaatacttgttgctgttgtgttagttcttgcaatggttataaagtttcagggtgttttcaaagcttatgcaaccactgtatttactataatgcttgtttggcttattaacgcatttgtattatgtgtacatagttataatagtgtcttagctattatactacttgtgctctattgttatgtatcacttgtgacgagtcgtaatactgccatagtaatgcactgttggcttgttttcacatttggtttaatagtacctaattggatagtttgcgtctatttaggttttattctatatatgtacacaccgctgtttttgtggtgttatggtacaactaaaaatagtcgcaagctttatgaaggcaatgagtttgttggtaattatgatcttgctgcgaagagtacttttgtaattcgtgggcctgaatttgttaaacttacgaatgagctaggcgataaatttgaatcctatctctcagcgtatgctaggcttaaatactactcaggcactggtagtgagcaagattacttgcaagcatgccgtgcatggttggcttatgcactagaccaatttagaagcagtggtgtagaagtagtatacactccgccacggtattctattggtgttagtaggttacaggctggttttaagaaactagtagctcctagtagtgctgttgagaagtgcgttgttagtgtgtcctataggggtaataatcttaatggattgtggctgggtgattctatttactgtccacgtcatgtgttaggtaagtttagtggtgatcaatgggatgatgtacttaaccttgctaataatcatgagtttgaagttgtaactggaaatggtgttactttgaatgttgtcagtaggcgtttgagaggtgcagttttaattttacaaactgctgttgccaatgctgaaactccaaagtataagtttatgaaagcaaattgtggtgatagttttaccattgcttgctcttatggtggtaccgttataggactctatcccgttactatgcgttctaatggaactattagagcatcttttctggcaggagcttgtggctctgtaggttttaatatagaaaagggtgtagtaaatttcttttacatgcaccatttggagttacctaatgcattacacactggaactgacttaacgggtgagttctacggtggttacatagatgaagaggttgctcagaaagttcaacccgataaattggttactaataatattttagcatggctttatgcagcaattattagtgttaaggagagtagtttttcactgcctaaatggcttgaaagtactactgttagtgttgatgattataataagtgggcagcggataatggttttacatcatttgtgagctgcactgctattactaaattaagtgctataacgggagttgatgtttgtaaactccttcgcactattatggtaaaaagtacacaatggggtagtgaccctattctaggacaatataattttgaggatgagatgacaccagaatctgtgtttaatcaggtgggtggtgttagactacaatcttcatttgtaaagaaagctgcgtcttggttttggagtagatgtgtgctagcttgcttcctatttgttttgtgtgctattgtgctgtttacagccataccatataaatattatttacatggtgctgttgttttacttgcaactgtgctttttatttcatttactgtgaaacatgttatggcgtatatggatacttttcttttgccgacattggttacagttattataggagtttgtgttggagtacctttcatttacaatactctaattagtcaaattgttattttctttagccaatggtatgatccagtagtctttgatactgtagtaccgtggatgttcttgcccttagtcttatatacagcttttaaatgtatacaaggttgttatagcgtaaattcctttaacacttctctgttattgttgtatcagtttatgaagttgggttttgttatatacacttcttctaatactgttgcagcatattcagagggtaattgggaattgttttttgatttagttcatactactgtgttggctaatgttagtagtaattctttaattggtttgtttgtcttcaaattggctaagtggatgctgtattattgtaatgcatcataccttaataattatgttctaatggctgtcagtgttaatggcataggttggatgttcacttgttactttggattctattggtggattaataaggttttcggtttaaccttaggcaaatataattttaaagtttcagtagatcaatataggtatatgtgtcttcataagattaaaccgcctaaaactgtgtgggaagtcttttcgacaaatatacttatacaagggataggtggtgagcgtgtgcttcctatagccactgttcaatctaaattaagtgatgtaaagtgtacaactgttgttttaatgcagcttttgactaagcttaatgttgaagcaaattcaaaaatgcatgcttatcttgttgagttacacaataaaattcttgcctcagatgatgttaatgagtgcatggataacttgttgggtatgcttgtaacactattttgtgtagatagtactattgatttaagtgaatattgtgatgacatacttaagagatcaactgttttacaatcagttacgcaggagttttcacatattccttcttatgcagagtatgaaagagctaaagatctctatgaaaaggtcttagctgagtctaaaaatggtggtgttacacagcaagagcttgctgcatatcgtaaagctgccaatattgcaaagtcaatttttgatagagatttggctgttcagaagaagttggatagcatggctgaacgtgctatgacaacaatgtataaggaagcgcgtgttactgatagaagggcgaaacttgtttcatcattacatgcgctattattttctatgcttaagaagatagattctgaaaagcttaatgtactatttgaccaagcaagcagtggtgttgtgccactagctactgttccaatagtttgtagtaataagcttactcttgtagtgccagacccagaaacatgggtcaagtgcgtagagggcatgcatgttacatattcaacagttgtttggaatattgataatgtcactgatgcagatggcactgaattgcaaccaatttctataggtaatggtttaacctattgtataagtggtgataatatagcatggccccttaaggtcaatttgactaggaatgcgcataataaagttgatgcagtattgcagaacaacgagcttatgccgcatggtgttaaaacaaaagcttgcgttgcaggtgtggatcaagcacattgcagcgtagagtctaagtgctattatactaatattagtggtaattcagttgtggctgctattacttcttcaaatcctaatttgaaagttgcctcatttttgaatgaagcaggcaatcaaatttatgttgacttagatccaccatgtaaatttggtatgaaggtgggtgataaagtagaagttgtttacttgtattttataaaaaatacaaggtcaattattagaggtatggtgcttggtgctatatccaatgttgttgtcttacagtctaaagggcatgagacagaagaagtggatgcagttggtatcctctcgctttgttcctttgtagtggatcctgctgacacatatattaaatatgtggcggcaggtaaccaacctttaggtaactgtgttaaaatgttgactgttcataatggtagtggttttgctataacatcaaagccaagtccaacccctgatcaggattcttatggaggagcgtctgtttgtctctattgtagagcacatatagctcatcctggtagtgctggaaacttagatggacgctgtcaatttaagggaagttttgtgcaaatacctactacggagaaagaccctgtcggcttctgtctgcgtaataaggtttgcactgtgtgtcagtgttggattgggcatggctgtcaatgtgatgcacttagacaacctaaaccatctgttcaatcagctgctggtgcaacaaattttgataagaattatttaaacgggtacggggtaacagtgaggctcggctgataccccttgttaatggttgtgaacctgatgttgtaaagcgagcctttgatgtatgtaataaggaatcagccggtatgtttcgaaatttgaagcgtaattgtgcaagattccaagaagtgcgtgatactgaagatggaagtcttgagtattgtgactcttattttgtggttaaacaaaccactcctagtaattatgaacatgagaagtcttgctatgaagacttaaagtcagaagtaacggcttctcatgatttctttgtgttcaataagaacatttataatattagtaggcagaggcttactaaatatactatgatggacttttgctatgctttgaggcattttgaccccaaagattgcgaagttcttaaagaaatacttgtcacttatggttgtatagaagactatcaccctaagtggtttgaagaaaacaaggattggtacgacccaatagaaaacccaaaatattatgccatgttggctaaaatgggccctattgttcgtcgtgcactattaaatgctgttggaaacctaatggttgaaaagggttatgttggtgtagttacacttgacaaccaggacctcaatggcaaattctacgattttggtgattttcagaagacggcacctggtgctggtgttcctgtttttgatacatattactcctatatgatgcccatcatagccatgacggatgctttagcacctgaacggtattttgaatatgatgtgcataaaggttacaaatcttatgatctcctcaagtatgattatacagaggagaaacaagaattgtttcaaaagtactttaagtactgggatcaagagtatcaccctaattgtcgaaattgttacgatgataggtgtctgatacattgtgctaatttcaacatacttttctccactttgatacctcaaacttcttttggtaatctatgtagaaaagtatttgttgatggtgtccctttcatagctacttgtggctatcattctaaggaacttggtgttattatgaatcaagataacaccatgtcattttcaaaaatgggtttgagccagcttatgaaatttgtaggagaccctgcccttttagtaggaacttctaacaatttagttgatcttagaacttcttgttttagtgtctgtgctttaacctctggtataccacaccagacagttaagccaggccacttcaataaggatttttatgattttgctgaaaaagcaggcatgtttaaggaaggatcatcaatcccacttaaacatttcttctatccacagacaggtaatgccgctataaacgattatgattattatcgttataacaggcctactatgtttgatatacgccagcttctattttgtttagaagtgacgtctaaatattttgaatgctatgaaggtggttgtataccagctagtcaagtggttgttactaaccttgataagagtgcaggcttcccctttaataagtttggaaaagcccgtctctattatgaaatgagtctagaggagcaggaccaactctttgaaagtacaaagaaaaatgtcttgcctactataactcagatgaatcttaaatatgccatatccgcgaaaaatagagcgcgtaccgtggcaggtgtgtcaattctttctactatgactaatagacagtttcaccagaaggttcttaagtctatagtcaatactagaaatgcacctgtagttattggaacaactaaattttatggcggttgggacaatatgttaagaaacctaattcaaggtgtagaggacccaatgcttatgggttgggattatcctaagtgtgatagagcaatgccaaatttgttgcgtatagcagcgtctttggtgcttgcccgtaaacatactaattgttgcacatggtctgagcgcatttatagattgtacaatgaatgcgcccaagtattgtctgaaactgtattagctacaggtggtatttacgtaaagccaggtggtactagcagtggtgatgccactactgcttatgccaacagtgtttttaacataatacaagccacgtctgctaatgttgcgcgtttgcttagtgttataacgcgtgatatagtatacgatgacattaaaagcctgcagtatgaattataccaacaggtttataggcgagttaactttgaccctgcctttgttgaaaagttttattcttacatgtgtaagaatttttcattaatgatcctgtctgatgatggtgttgtgtgttataacaacacacttgccaaacaaggtcttgtagcagatatttctggttttagagaaattctctactaccaaaataatgtctatatggcagattctaagtgctgggttgaaccagatttagaaaaaggcccacatgagttttgttcacagcacacaatgcttgtagaggttgatggcgagccaaggtacttgccatatccagacccctcgcgcattttgggtgcatgtgtttttgtagatgaagtggataagacagagcctgtggctgttatggagcgttatattgctcttgccatagacgcttacccgttagttcatcatgagaatgaggagtataggaaagttttctttgtactcctatcttatattagaaagctctatcaggagctctcccaaagtatgcttattgactactcctttgttatggacatagacaagggtagcaaattttgggagcaggagttctatgaaaatatgtatagggctcctacaactttacaatcgtgtggtgtttgtgtagttggtaatagtcagactatactacgctgtggtaatagtattagaaaaccattcttgtgtgcaaatgttgcttatgaccatgtcatgcacactgaccacaaaaacgttttgtctataaacccatatatctgctctcaacctggttgtggtgaagcagatgttactaaactttacctcggaggtatgtcttacttctgtggtaatcataaacctaaattatcaataccgttagtatctaatggtaccgtttttggaatttatagggccaattgtgtaggtagtgaaaatgttgatgattttaatcaactagccaccactaattggtctactgttgaaccttatatattagcgaatcgctgtagcgactcattaagacgctttgctgctgagacagtcaaagcaacagaagagttgcataaacagcaatttgctagtgcagaagtcagagaggttatttctgaccgtgaattaattctatcatgggaacctggtaagactaggcctccattgaacagaaattatgttttcacaggctaccactttactagaactagtaaggtgcaactaggtgattttacttttgaaaaaggtgaaggtagggatgttgtttattatagggcgacgtctactgctaaattgtctcctggagacatttttgtcttaacatcgcacaatgttgtttctcttgtagcaccaactttgtgtcctcaacaaaccttttctaggtttgttaatttaagacctaatgtaatggtaccagaatgttttgtaaataacattccactttaccatttagtaggtaaacaaaagcgtactacagtacaaggccctcctggcagtggtaagtcccactttgctattggccttgctgcatactttagtaacgctcgtgtagtgtttacagcatgctctcatgctgctgtagatgcactttgtgaaaaggcatttaaatttcttaaagttgatgattgcactcgtatagttccacaaaggactactgtcgactgcttctcaaaatttaaagctaatgacacaggcaaaaagtacatttttagtactattaatgccttgccagaagttagttgtgacattctgttggtagatgaagttagtatgttgaccaactacgaattgtcatttattaatggtaagataaattaccagtatgttgtgaatgtaggtgaccctgctcaattaccggcacctcgcactttgcttaatggttcactttcgcccaaggattataatgtcatcacaaatcttatggtttgtgttaaaccagacatcttccttgcgaagtgttaccgttgtcctaaagaaattgtagacactgtgtcgactcttgtttatgatggaaagtttgttgcaaataacccagaatcacgtgagtgtttcaaggttatagttaataatggtaattctgatgtagggcataagagtggttccagcctacaaacacaacaccaattggagtttgtgaaagactttgtttgtcgcaataaacaatggcgagaagcaacatttatttcaccttacaatgctatgaatcagagagcttatcgcatgcttggacttaatgtccagacggtagactcatctcaaggttcagagtatgattatgttatattctgtgttacagctgattctcagcatgcactgaatattaatagatttaatgtagcgcttacaagggctaagcgtggtatacttgttgtcatgcgtcagcgtgatgaattatattctgctcttaaatttacagagttagatgctgaggcaagtctgcaaggtacaggtttgtttaaaatttgcaacaaggaatttagtggagtacatcctgcttatgcagtaaccaccaaagcacttgctgctacctataaggttaatgatgagctagcggcacttgttaatgtagaggctggttcagagataacttataaacatcttatttccctgttagggtttaagatgagtgttaatgttgatggttgtcacaacatgtttataacacgtgatgaggcaatccgcaatgttagaggttgggttggttttgatgtagaagccacacatgcttgtggcactaatattggcactaaccttccatttcaagtaggattctctactggtgctgactttgtagtcacacctgagggtcttgttgatacagcaatgggcaataattttgagcctgtgaactctaaagcacccccaggtgaacaatttaatcacttgagagctttgtttaagagtgctaagccttggcatattataagaccaaggatagttcagatgttagcagacaatctatgcaatgtttcagattgtgtggtgtttgtcacatggtgtcatggccctactaaactaactactttgcgttattttgttaaaataggcaaggactctgtctgttcttgtggttatagagctacaacttttaattctcatactcaggattatgcttgttggaagcactgtttgggttttgattttgtttataatccacttttagtggatattcagcagtggggttactcaggtaatcttcaatttaatcatgatttgcattgtaatgtgcacggacatgctcatgtagcttcagctgatgctgtaatgacccgttgccttgcaattaataatgcattttgtaaagatgtcaactgggaactaacctaccctcatattgcaaatgaggatgaagtaaattccagttgcagatatctacaacgcatgtatcttaatgcgtgtgttgatgctcttaaagttaatgttgtctatgatataggcaaccctaaaggtataaaatgcgttagacgtggggatgtcacatttaggttttatgacaaaaacccaatcgtacccaacgtcaaacagtttgagtatgactatagtcagcataaaaataagtttgctgatggtctgtgtatgttttggaattgtaatgtggattgttatcctgacaattctcttgtctgtaggtatgacacacgtaatttgagtgtgtttaatttacctggttgtaatggtggtagtctgtatgttaataaacatgcattccatacgcctaagtttgagcgtgttagcttccgtaatttgaaagctatgccattctttttctatgactcatcgccttgcgaaaccattcaagttgatggagtagcgcaggaccttgtgtcattagcaactaaagattgtatcacaaaatgcaacattggtggtgctgtttgtaagaagcacgctcaaatgtatgcagaatttgtggcatcttataatgcagctgttacagctggtttcacattctgggtttctaatcaatttaacccgtataatttgtggaaaaatttttcagctctccagtctattgacaatatcgcttataatatgtataagggtgggcattacgatgctattgcaggcgaaatacccacagtcattactggagataaagtctttgttattgatcaaggtattgaaaaggcagtttttgttaatcaaacaacgctgcctacatcagttgcatttgagttgtatgcgaagcgaaatattcgcacactgccaaataatagaatattgagtggtctaggtgtggacgtgacctatggttttgtaatatgggattacgccaaccaaacaccgctgtatcgtaatactgttaaagtatgtgcatacacagacattgagcctaatggcctaatagttctgtatgatgatagatatggtgattaccagtctttcttagctgctgacaatgctgtcttagtgtctacacagtgttataagcggtttccatacgtagaaataccatctaatttgcttgttcagaatggtatgccattaaaagatggagcgaatctgtatgtttataagcgtgttaatggagcgtttgttacgctacctaacacattaaacacacagggtcgtaattatgaagcttttgaacctcgtagtgatgttgagagagatttcctcaacatgtctgaagaggactttattgaaaagtatggtaaggacctaggtctacaacacatactttatggtgaagttgaaaagccacaattgggtggtttacacactgttataggtatgtacaggcttttgcgcgctaataaattagacgcaaaatccgtaactaattcagattctgatgtcatgcaaaactattttgttttggcagacaatggttcttataagcaggtttgcacagttgtggaccttttgcttgacgatttcttagaacttcttaggaacatactaaaagagtatggttctaataagtctaaagttgtaacagtgtccatagactaccatagcataaattttatgacttggtttgaagatggtagtattaaaacatgttacccacaacttcaatcagcgtggacatgtggttataatatgcctgaactctacaaagttcagaattgtgttatggaaccttgtaatattccaaactatggtgttggaattacattgcctagtggtattatgatgaatgtggcgaagtatactcaactttgccagtatctttctaaaactacaatgtgtgtgccgcataatatgcgcgtaatgcactttggagctggtagtgataaaggagttgcacctggtagcactgttcttaaacaatggttacctgagggaacactccttgttgataatgatattgtcgattatgtgtctgatgcacatgtttctgtgctttcagactgcaatagatataagacagagcacaagtttgatcttgtggtatctgatatgtatacagataatgattcaaagagaaaacatgaaggcatagtagccaataatggtaatgacgatgtcttcatttacctatctaatttcttaaggaacaacttagctcttggtggtagttttgccattaaattgacagagacaagttggcatgagagtctttatgatattgcacaggattgtgcatggtggacgatgttttgtacagctgtgaatgcttcatcttcagaagcattcttgattggtgttaattatttgggtgacagcggaaaagtgaaagttagtggaaaaacactgcacgcaaattatatattttggaggaattgtaattatttacaaacctccgcttatagtacatttgacgttgctaagtttgggttaaaactaaaagcaacgccagttgttaatttgaaaactgaacaaaaaaccgacttagtaactaacttactaagtaacggtaaattattggttagagatgttggtgaagtcaacttttttagtgactcttttgtctgcactatgtagtgcagttttgtatgataatggtaattatgtttattactaccaaagtgcatttagacccccaggtggatggcatttgcaagggggtgcttatgcagtagttaattctactaataagtctaataatgcaggcactgcctccgagtgttctgtgggtgttctttttaattatactaacgggaatagtgacgttggttataatcaaagtgcttcctccatagccatgacagcaccgcttcctggtatggcttggtctaaatcacaattttgtactgctcactgtaacttctcggattttacagtgtttattacacattgttttgcaaattcttgtcctttaacaggtaggatagatcagaaccatattcgtatttctgctatgagaaatggttttttattttataatttaacagttagtgtaactaaataccctaactttaaatcgcttcaatgtgttaacaatcacacttccgtttatctaaatggtgatcttgtttttacatctaatcaaaccactgatgtcataggtgctggtgtgtattttaaagcaggtgggcctataatctataaaattatgaaagaatttaaggttttggcttattttgtaaatggcactgtacaagatgttgttttgtgtgatgactcacctagaggattgttggcatgccagtataatactggcaatttttcagatggtttttatccttttactaattctagtttagttaaggaaaagttcattgtttatcgtgaaagtagtgttaatactactttgacgctaactaatttcacttttactaaccaaagtaatgcaccgcccaatagtggtagtgttcaaacttttgttttatatcaaacacaaacagctcagagtggttattataattttaatttatcatttctgaattctttcgtgtataaagcaagtgattttatgtatgggtcgtatcaccccgcctgtcattttagaccagaaaccattaacagtggtttgtggtttaactcgttgtcagtttctcttacctatggacccctacagggagggtgtaagcaatctgtttttagtggtaggacaacgtgttgctatgcctactcttatgatggcccaagagcctgtaaaggtgtctattcaggtgagttaaggaaagattttgaatgtggattgttggtttatgttactaagagtgatggctctcgtatacaaactaggtcagaacccttagtattaactcaacacaattataataatattactttagataagtgcgttgagtataatatatatggcagagaaggccatcttagaattactaatgtgactgattctgctggtaattttaattatctagcagatggtggattagctattttagatgcatctggtgccatagacatttttgttgtacatggcacctatggtcttaattattacaaggttaacccttgtgatgatgttaacaaacagtttgtagtgtcgggtagcaatatagttggtattcttacttctaaaaatgaaacaggttctgaacaggttgagaatcagttttatgttaaattaactaatagctcacgacgtactagacgttccagtagtcgaaatgttacaagctgtccatatgttagttatggcagattttgcattgaaccagatggttcattaaagataatagtgcctgaagaattggagcactttgtggcacctttactaaatgtcactgaacatgtactcatacctacaggttttaatttgactgttacagatgagtacatacaaacacgtatggataaggtccaaatcaactgcctgcaatatatttgtggcaattctttggagtgtagaaaattatttcaacaatatggtccagtttgtgataacatattgtctgttgtaaatagtgttagtcaaaaagaagatatggaacttttaaatttctattcttccaccaaaccaagtggttataattcaccggttttcaataacttgactactggtgaatttaacatttctctcgtactaacgcaacctagtagtcctagtggacgctcgtttgttgaagaccttttatttacaagtgtagaaacagttggtttaccgaccgacgctgagtataagaagtgcacagcaggacctttaggtgctcttaaggatcttgtttgcgctagagaatataatggcttactaatgctgcccccaattattacagcggatatgcagacaatgtatacagcttctttagtagcatctatggcttttggtggtattacagcggctggtgctataccttttgctactcagatacaagctaggattaatcatttaggtattactcagtctcttttgttgaaaaatcaagaaaaaattgcagcctcctttaataaggcaattgtccatatgcaggaaggctttagaagtacttctctagctttacaacaaattcaagatgttgttaacaagcagagtgctattcctgccgaagctttggtagcacttaataaaaattttggtgccatttcttcagtaatgcaagatatttaccagcaacttgatgctattcaagctgacgctcaggttgatcgtctgattactggtagactttcatcactctcagtgttggcagcagctaagcagtctgagtatcttaaagtctcacaacaacgcgaattagccactcagaaaattaatgagtgtgttaaatcgcaatctactaggtattctttttgtggtaatggaagacatgtcttaaccataccacaaaatgcacctaatggtatagtgtttatacactttacttacactcccgagagttttgttaatgtaacagcaatagtaggtttttgcgtaaacccgactaatgctagtcagtatgcaatagtgcccgctaatggaagaggtatttttataagtgttaatggtacatactatatcacagctcgtgatatgtatatgccaagaaacattacttcaggagacatagtaactttaacatcttgtcaagcaaactatgtcagtgttaataaaacagtcgttactacttttgtggataatgatgatttcgattttgatgatgaattatcaaagtggtggaatgatactaagcatgaactaccagactttgattatttcaattacacagtacctattttgaatattagtagtgaaattgatagaattcaaggtgtcatacaaggtcttaatgattctttgatcgaccttgaaacactatcaattctcaaaacttatattaaatggccttggtatgtctggcttgccataggttttgcagttattatattcatcctaatattgggatgggtgtttttcatgactggttgttgtggttgttgttgtggatgctttggtatcattcctctaatgagtaagtgtggtaagaaatcttcttattacacgacttttgataatgatgtggtaactgaacaatacagacctaaaaagtctgtttaatgattcagaatccaacatcttttctaatagtgttaattcttctttggtttaaacttgtgctaagttgttttagagattgtgtgttagcactcctacaactaatacaagttctactccaaattattaatagtaatttacaatctaggctgctcctttggcacagcctagactaatgttagattttgagaaaataattgaaactggtgaagtagtaatacaacaaatcagtttcaaattacaacatatttcaagtgttctagaaacacaaatttttgacccatttgagtgttgctattattcaagtggtagtttttatgaaatagagtcagctgacgattgttcagatgaatatactgactaaatcgctagaagagaacggcagttttccaacagccctttatgtatttttggcatttgtagcactttatcttttaggtagagcactacaagctttcgtacaagcagctgatgcttgttgtttattttggtatacatgggtagtagttccaggagctaagggtacagcctttgtatacaagcatacatatggtagaaaacttaacaatccggagttagaacacgttattgttaacgagttcccaaagaacggttggaataatgatagccctgcaatttttcaggatgtcgatcggcacggaaaattgcactcttagtactcagcaagcggctgagcttttcaaagaatacaatctatttataaccgcattcctattgtttcttactatactacttcagtatggatacgcaactaggagtcggcttatttacatactgaaaatgatagtgttatggtgcttctggccccttaacattgcagtaggtgtaacttcatgtatatacccaccaaacacaggaggccttgttgctgcaataatactcactgtgtttgcgtgtttatcttttataggttattggattcagagcattagactctttaagcggtgtaggtcttggtggtcttttaaccccgagagcaatgccgtaggttcaatactcctaacaaatggtccacaatgtaattttgctatagagagtgtgccaatggtactttctcctattattaagaatggtgctctttattgtgaaggtcagtggcttgctaaatgtgaaccagatcacttgcctaaagatatatttgtatgcacaccagatagaagaaatatctatcgtatggtgcagaaatacactggtgaccaaagcggaaataagaaaaggtttgctacatctgtatatgccaaacagtcagtagatactggcgagctagaaagtgtagcaacaggaggaagtagtctttacacataaatgtgtgtgtgtagagagtacttaaatttattctttaatagtgcctctattttaagagcgcataagagtatttattttgaggatcttaatataaatcctctttgtttcatactctcctttcaagagttattatttaaagaacagtttttccactcttttgtgccaaaaactattgttgttaatggtgtgtgtttccaagtagataatggaaaagtctaccacgaaggaaaacccatttttcagaaaggttgttgtaggttgtggtcccattataagagggattagaataattaaaccaccaacaacaatttcttgtattaaaggtgtttgggtttacaaacgcttaaaagaaacaaatacggaatgaaatggttgtctagtttaggacgagcatttatttccttttataaatccctactattaactcaactcagagtattagataggttaatcttagagcacggaccaaaaagtacattaacgtgtgctaggcgagtgcttttagttcaattagatttagtttataggttggcatatactcccaaccagtcgctggtatgaataatagtaaagataatccttttcgcggagcaatagcaagaaaagcgcgaatttatctgagaggaggattagattgtgttcaacttaacaaagcaggacaagcagagccttgtcccgcgtgtacctccctagtattccaagggaaaacttgtgaggaacacatagataataataatcttttgtcatggcaagtcgtaagacagctgaaaagtcagatgccccgacaccaatcatcaaactaggagggcctaaaccaccaaaggtagggtcatctggaaatgcatcttggtttcaagccttaaaggccaagaaactaaatgcacctgcacctaagtttgaaggtagtggtgttcctgataatgaaaatctaaaaccaagcctgcagcatggatactggagacgccaagccaggtataagccaggtaaaggtggaagaaaaccagtccctgatgcgtggtacttttactacactggaacaggaccggccgctgacctgaattggggtgattctcaagatggtatagtgtgggttgctgcaaagggtgctgatgtaaaatctagatccaatcagggtacaagagaccctgacaagtttgaccaatatccactacgattttccgatggaggacctgacggtaatttccgttgggatttcattcctctgaatcgtggtaggagtggaagatcaactgcagcttcatcagcagcatctagtagagcaccttctcgtgaaggttcacgtggtcgtaggagtggagctgaagaagacttgattgctcgtgcggcaaagattattcaggaccagcaaaggaagggtacgcgcattatcaaggcaaaggcagatgaaatggctcaccgtcgattctgtaagggtaccattccacctggttatagagtagatcaaggatttggccctcgtactaaaggtaagaagggaaattttggtgatgacaagatgaatgaggaaggtattaaggatgggcgtgttacagcaatgctcaaccttacacctagccctcatgcttgtctttttggaagtagagtgacgcccaagcttcaaccagatgggcttcaccttagatttgaatttactactgtggtgcctagagatgacccgcagtttgataattatgtaaaaatttgtgatcagtgtgttgatggtgtgggaacacgtccaaaggatgatgaaccaagaccaaaatcacgctcaagttcaagacctgcaacaagagcaagttctccagcgccaaaacaacagcgccctaagaaggagaaaaagccaaagaagcaggatgatgaagtggataaagcattgacctcagatgaggagaggaacaatgcacagctagaatttgatgatgaacccaaagtgattaattggggtgattcagcacttggtgaaaatgaactttgattaacataatggacttgctgcattttatgtggcattgctgttgttattattgctctgcttttctctcaatcattatgggctttgattgtgatcatgtgcagtaccttagttggtttcccttgttgtttgcagtttgtcttctttctgtgcttattgtttttattctgctttattctttgttatatcgtagaagtttattaaaggttaaggaagataggcatgtagcttgattacctacatgtctatcgccagggaaatgtctaatctgtctacttagtagcctggaaacgaacggtagacccttagattttaatttagtttaatttttagtttagtttaagttagtttagagtaggtataaagatgccagtgccggggccacgcggagtacgatcgagggtacagcactaggacgcccactaggggaagagctaaattttagtttaagttaagtttaattggctaagtatagttaaaatttataggctagtatagagttagagcaaaaaaaaaaaaaaaaa

SEQ ID NO: 19 - DNA, 19940 bp, Coronavirus
atggcttcaagcctaaaacagggagtatcttcccaaaaccagaggagtgtcgttcttgttgccaaagacattcccgaccaactccgtgacgctttgtttttctatacgtcacacaacccaaaggattacgctgatgctttcgcctataggcagaagtttgatcgtaatctgggggctgggaaaaagtttaaatttgaaactgtgtgtggttcattctttttgcaaggagtggacaaaataacacctggtgtcccagccaaagctttaaaagccacttctaggttggcagatttggaagacatctttggtgtctcacctctagcacggaaataccgtgaactccttaaaacagcatgccagtggtctctaacagtagaatcaatggatgctcgtgcacaaactcttgaagaaatctttgactcggctgaaatactttggcttcaggttgcagcaaagatccaggtttcggctatggcaatgcgcaggcttgttggtgaagtaactgcaaaggtcatggatgctttgggctcaagtctgagttctcttttccaaattgtgaaacagcaaatagtcagaatctttcaaaaggcactggctatttttgggaatgtgaaagatttgccacagcgtattgatgcactcaagatggcttttgccaagtgtgcaagatcaattacagttgtggttgttggacatgctctcactatcagagagtttgctggaacttgtcttgcaagcattaatggtgcagttgcaaaattctttgaagaacttccaactggttttatgggtgctaaggtcttttcaactcttgccttctttaaagaagcagcagcaaagatcgtagaaaacataccaaatgcgccaagaggtactaaaggtttcgaagtcgttggcaatgccaaaggtacacaagttgttgtccgtggcatgcgaaatgacttaactctgcttgatcaaaaagctgaagttcctgtggaaccagaaggttggtctgcaattttggagggacatctttgctatgtctttaagagtggtgatcgcttttatgcggcacctctttcaggaaattttgcattgcatgatgtgcattgctgcgagcgtgtagtctgtctgtctgatggtgtaacaccggagataaatgatgggcttgttcttgctgcaatttactcatcttttagtgtttcggaacttgtggcagcacttaaaaaaggtgaaccattcaagttcttggggcacaaatttgtttatgtgaaggaagcggcagtttctttcaccttggcaaaagcagcaaccattggagatgtcctgaagctgtttcaatcagcaagagtaaagacggaagatgtgtggtctgcacttactgaaaagtcttttgaattctggaaacttgcgtacagaagagtgcgcaatcttgaagaatttctgaagactcatttttgtaaagctcaaatgtcaattgtgatcctagcagcagtgcttggtgagggcatttggcatctttgttcacaagtcatctataaattgggtggtttgttttctaaagttgttgacttttgtgcaatacactggaaaggtttttgtgaacaattgaagaaggctaagcttcttgtcactgagcacctatgtgtcctgaaaggtgttgcacagcattgttttcaacttttgctggatgcaatacattctatgtacaagagttttaaaaagtgtgtacttggtagaatccatggagacttactcttttggaaaggaggtgtgcataaaattgtccaagaaggcgatgaagtttggttcgacaccatagatagtgttgatgttgaagatctgggtcgtgtccaggaaaaacctgtagattttgaggtttgtgatggtataacacttccagaaaatcaacctggtcatatggtccagtttgaagatgatggaaagaactatatgttcttccgcttcaaacgtgaggacagtgtttattacgcaccaatgtcacaacttggtgcaattaatgttgtttgcaaagcaggtggtaagactgtcacgtttggtgaaactacagtgcgagaaataccatcacctgatgtggtgcctattaaggttagcattgagtgttgtggtgaaccttggaacactatctttaagaaggcttataaagagcccattgaagttgaaacagacctcacagtagaacaattgctcgctgtgatctacgagaaaatgtgtgacgacctcaaattgttcccagaggctccagaacctccaccatttgagaatgtagcacttgttgataagaatggtaaagatttggattgcataaaatcatgctaccttatctaccgtgattatgagagtgatgatgacatcgaagaggatgacgctgaggagtgtgacacagcttcagataatgctgaggaatgtgaaacaacttcggagtgtgaagaagaggatgaaggtacaaaggtgttggctctcatacaagacccagcaagccaaaaataccctctgcctcttgatgatgattacagtgtctatagtggatgtatagtccataaagacgctctcgatgttgtgaatttaccatctggtgacgaaacttttgttatcaacaattgttttgatggcgctgtaaaagaactcccaaagtcagttgtagatgttctaagtgactggggtgcagccgtcgatgcacaggagaagtccttgaatgacgtagctgattccagtagtgtaccagtgccggaggaagatccggtagttagtactaatgtaattcatgaacaggaggtcattcctgttgtagaagaagagcaaagtgtcgttgtcttcacacctgctgaagtcgatgttataaaagaaacaccagatgaatttattctcattccggaagtttctgttgttgaagaagcaattcctgttagcagagaagatgaagtaacttcgcaacaggatgaatttaaagatttttctcgagttgaagatgcaagtggtgcacaacaggaagaatctaaaattgaagagcctcctcaagctgtaaaaacacaacgtgagaagagggctaagaagtttaaagtcaaagtaaccacacaaaaagctcctagttgtttggagtataaaacttgtgtgggtgatttaactgttgtgatagccaaggcattggatgagtttaaagagttctgtgttgtaaacgccgcaaatgagcatatgtctcatgggggtggcgttgcaaaagcaattgcagacttttgtggtccagattttgtggagtattgtgaagactatgttaagaaacatgggccacaacagagacttgtcacaccttcttatgttaaaggcattcaatgtgtgaacaatgttgtaggtccacgccatggggacagtgacttgtttcaaaaactggttactgcgtacaagaatgttattgttgatggcgtggtcaattatgttgtaccagttctctcatctggaatttttggagttgattttaaattgtcaatagatgctatgcgtgcggcctttgatggttgcaacatacgtgtccttctcttttctctgaatcaagaacacatcgaatatttcgatgcaacttgtaagcagaagacaatttatcttacagaagatggtgttaaataccgctctgtagttgtgaaacctggagactctttgggtcagtttggacaggtttttacaagacacaagactgtctttacggctgatgatgttgaagataaagaaattctctttgttccaactactgacaaggctgttcttgattattatggtttggatgcgaaaaagtatgtgatatatttacatacgctttcacaaaagtggaaaatcctagttaaggataattttattcaacttgagtggcgtgatggaaattgctgggttaattcagcaatagtaatccttcaggctgctaagattaagtttacaggttttcttgcaggagcatgggctgctctgttgggtggagatcccacagactttgtagcatggtgttatgcaagttgcaatgctaatgttggtgaattttcagacgctaattggctcttggccaatttggcagaacattttgatgtagattacacgaatgcacttcttaagaagtgtgtttcttgtaattgtggtgttaagagttatgagtttagaggccttgaagcttgcattcagccagtaaaggcacctaatctactacattttaaaacgcaatattcaaattgccccacttgtgattcaaatagtgtagatgaagttgtagaagcttctctcccatatttgcttcttctagcgacggatgggcctgctgcagtagattgtgatgatagtgctgcaggaaacatagtgttcataggttccactaacagtggtcattgttatacacaagccgttggtaaggcttttgataatcttgctagtgatagaaaatttggaaagaagtcgccttacattacagcaatgtatatccgcttctctcttaaaagtgaaaattctatgcctgttgctaacaagagcaaaggtaaaggtcaagtagtaaaagaagatgttgctaactttgctattagttcaaaagtcagttttgataatcttactgactttgagcagtggtatggtagtaacatttatgagagtcttaaagtgcaggaaacatctgacaatcttgatgattatgtgtcatttacaacaaaggaagattccacgttgccactgacacttaaagttcgtggtattaaatcagttgttgattttaagtcaaaggatggctttacttataaattaacacctgatattgatgaaaattcaaaggcacctgtttactacccagtcttagactctgttagtcttagagcaatttgggtagaaggtaatgctaattttgttgttggacatccaaattataatagtagagccttgcgaattcccactttgtgggattgtgcagagagttttgttaaaattggtgaaaaggttaatggtgttactatgggcctatggcgtgcagaacaccttaataaacccaatttggagacgcttttcaatatcgttaagaaaacgattgttggaactaatattgttactacccagtgtggtaaaataatttctaaggctacatcatttatagctgataaagtaggagatggtgtagttcgcaatgttactgatagaattaaagggtgttttgggtttactagggagcattttgaaagaagagtgtctccacagttcttaaaaaccctctttttcttcttcttctgtcttctgaaggctagtgctaagagtttaatgtctagctacaagagtgtgctacgtaaagtggtatttactgctttacttataatatggtttgtctacacaagcaacccagtaatgtttactgggatacgtgtgttagatttcctatttgaaggttcattctgtagtccttatgcagattacggcaaagaatcttttgatgttttacgctattgcggaagtgatttcacttgccgtgtttgtttacatggtagggattcgctacatttgtataaacatgcctatagcgtagaacagttttataaagatgcagttaatggcatcagttttacatggaattggctttatatgctgttcctaatactctttgttaagccagtggcaggttttgttattatttgctactgtataagatatttggttttaagcacaactgtattgcaaactggtgtaggatttttagactggtttattcaaacagtgtttgctaactttaattttatgggggcagggttttatttctggctcttttataagatatatatacaggtgcatcatataatgtactgtaaggatataacatgtgaagtttgtaagagagttgcgcgcagtaatagacatgaggttagtgtagttgttaatgggcgtaaacagcttgtccacgtctacactaactcaggttacagtttctgtaagagacataattggtactgtaagaattgtgacaagtatggtcatcaaaacacatttatgtctcctgaagttgctggtgagctttcagaaaagcttaaacgtcatgttaaacctacagcacatgcataccacgtagtggatgatgcatgcttagttgatgactttgttaatctgaagtacaatgctgccaccccaggtaaagaaggtgtgcattctgctgttaaatgttttagtgtatctgatttcttaaagaaagcagtctttcttaaggatgcacaaaaatgtgaacaaatatctaatgatagttttatagtttgtaatacacacagtgcgcatgcattagaggaagctaaaaatgcagccatctattatgcgcaatgtctttgtaaaccaattcttatacttgatcaggctctttatgaacaattgattgtagaacctgtgtctaagagtgttgtagacaaagtgtgtaatgttttgtctaatataatatctgtagattctgcagctttgaattataaggctggcacacttcgtgatgccctcctttctgttactaaggatgaagaagctgttgatatggctatcttctgccataacaatgatgttgaatatactaatgatggttttactaatgtggtgccatcatatggtatagacactgataagttaacacctcgtgatagaggctttttgataaatgcagatgctgccattgctaacttgaaagtgaaaaattcaccgccagtagtgtggaagtattctgaccttattaaactgtctgacagttgtcttaagtatttaatatcggcaactgtaaagtcaggaggtaggtttttcataacgaggtctggtgctaaacaagttattgcttgttatactcagaagttgttagtggaaaagaaggctggtggtgttgttagtaacactgttagttggtttaggagttgttgtaaatggctcttagtgttctatttactttttacagtgtgttgtttgggttactatcaatgggaaatgagtagagaatttcctcatcccatgtatgattttaattccacaatgcatgtagaagggtttaaggttatagataagggtgtacttagggatattatgccagaagacacttgcttctctaataagtatgttaattttgactcattttggggaaaaccttatgtaaatagtagagactgtcctattgtaaccgctattatagatggtgctggaacagtagctgctggttctcctggttttgtacagtgggtcatggatggtgtaatgtttatccatatgacacaaactgagcgaagaccttggtatattcctacttggtttaatagagaaattgttggttacactcatgattctattgttacagaaggtgagttttatacttccatagcattgtttgcttctagatgtttgtatttaacatctagtaacacaccacagctttattgctttaatggtgatagcgatgctcctggtgcattaccgtttgcaaatatactccctcatagggtatattttcaacctaatggagttaggcttattgtgcctcagcaaattatgcatacaccatacatagttagacttgtttcagatagctattgtagaggtagtgtttgtgaatatactaaaccgggttattgtgtttcaatgaattcccaatgggttttgtttaatgatgaatacacaagtaaaccaggtgtgttttgtggcgctactgttagagaacttttgtttagtatggttagtacattctttactggtgttaatccaaatatttatatgcaattggcaactatgttcttaatacttgttgctgttgttttagtttttgcaatggttataaagtttcaaggtgtttttaaagcttatgcaaccactgtatttactataatgcttgtttgggttattaatgcatttgtgttatgtgtgcatagttataataatgttttagctattatactacttgtgctttattgttatttatcacttgtgacgagtcgtaacactgctataataatgcactgttggcttgtcttcacatttggtttaatagtacctagttggatagcttgtgtctacttaggttttgtattatatatgtatacaccgctggttttgtggtgttatggtacaactaagaattgccgtaagctttatgaaggcaatgagtttgttggtaattatgacctcgctgcgaagagtacttttgtaattcgtggccctgaatttgttaaacttactaatgagataggcgataaatttgacgcctacctctcagcgtatgctagacttaaatactattcaggtactggcagtgagcaagattacttgcaagcctgccgtgcatggttggcttatgcactagatcaatttagaagcagtggtgtagaagtagtgtataccccaccacggtattctattggtgttagtagattacaggctggttttaagaaactagcagctcctagtagcgctgttgagaagtgcattgttagtgtgtcctataggggtaataatcttaatggattgtggttgggtgattctatttactgtccacgtcatgtgttaggtaagtttagtggtgatcaatgggatgacgtacttaatcttgctaataatcatgagtttgaagttgtaactggaaatggtgttactttggctgttgtcagtaggcgtttgagaggtgcagttttgattttacaaactgcaattgctaatgctgaaactccaaagtataaattcatgaaagcaaattgtggtgacagttttaccattgcttgctcttatggtggtacggttataggactttaccctgtcactatgcgttctaatgggactattagagcgtcttttcttgccggagcatgtggttcagtaggttttaatatagaaaggggtgtagtaaatttttactatatgcaccatctagaattgcctaatgcattacacactggaactgatctaaatggtgcgttctatggtggttgtgttgatgaggaggttgcacagagagtgccaccagataaccttgttactaacaacattgttgcatggctttatgctgcaattattagtgttaaagagagtagtttttcaacgcctaaatggcttgaaagtactactgtcagcgttgatgattataataagtgggctggtgataatggttttacaccgttttcaactagcactgctatcactaaattaagtgctataacgggagttgatgtttgtaaactccttcgcactattatggttaagtctagtcaatggggcaatgaacccattttaggccaatataattttgaggatgaactaacaccagaatctgtttttaaccaggttggtggtgtcagactacagtcttcttttgtgaaaagagctacatcttggttttggagtagatgtgtgttagcttgtttcttatttgttttgtgtgctattgttttgtttacggcagtgccacttaaatattatgtgcatgcagctgttgttttgttagcggctgttacatttatctcttttactgttaaacatgttatggcatatatggatactttccttttgccgacattgattacagttattattggagtttgtgctgaagtacccttcatttacaatactctaattagtcaaattgttattttctttagccaatggtatgatccagtagtgtttgatactatggtaccatggatgttcttaccattagtgctgtacacagcttttaagtgtgtacaaggttgctatagtgtaaattctttcaatacttctctgttagttttgtaccagtttatgaagttggggtttgttatctatacctcttctaacactgttactgcatactcggaaggtaattgggagctattctttgaattagtacacactactgtgttggctaatattagtagcaattccttaattggtttatttgtatttaagttggctaaatggatgctgtattattgtaatgcaacatactttaataattatgtgctaatggcagtcatggttaatggcttaggttggctctttacttgttactttgggttttattggtgggttaataaggtttttggtttaaccttaggcaaatataatttcaaagttccggttgatcaatataggtatatgtgtcttcataagataaaaccacctaaaactgtgtgggaagtcttttcgacaaatatacttatacaaggtataggtggtgagcgtgtgcttcctatagccacagttcaatctaaattaagtgatgtaaaatgcacaacagttgtcttaatgcagcttttgactaagcttaatgttgaagcaaattcaaaaatgcatgcttatcttgtagagttgcacaataaaattcttgcctctgatgatgttaatgagtgcatggataatttgttgggtatgcttgtaacactattttgtgtagatagtactattgatttaagtgagtattgtgatgatatacttaagagattaactgttttacagtcagttactcaggagttttcacacataccttcttatgcagaatatgaaagagctaaaaacctctatgaaagggtgttagctgattctaaaaatggtggtgttacacagcaagaacttgctgcatatcgtaaggctgccaatattgcaaagtcggtctttgatagagacttggctgtacaaaagaagttagatagcatggcagagcgcgctatgacaacgatgtataaggaagcgcgtgttactgatagaagagcgaaacttgtttcttcattacatgcgctgttattttctatgcttaagaagatagattctgaaaagcttaatgtactattcgaccaggcaagcagtggtgttgtgccactagctactgttcctatagtttgtagtaataagcttactcttgtagtgccagacccagaaacatgggtcaagtgcgtagagggcatgcatgttacatattcaacagttgtttggaatattgataatgttactgacgcagatggcactgaattgcaaccaatttctacaggtaatggtttaacatactgtataagtggtgataatatagcatggccccttaaggtcaatttgactaggaatgtgcataacaaagttgatgcagcattgcagaacaacgagcttatgcctcatggtgtaaaaacaaaggcatgcgtggcaggtgtagatcaagcacactgcagcgtagagtctaaatgttattatactaatattagtggtaattcagtagtggctgctattacctcctcaaatcctaatttgaaagtcgcctcatttttgaatgaagcaggcaaccaaatctacgttgacttagacccaccatgtaaatttggtatgaaggtgggtgataaagtagaagttgtttacttgtattttataaagaatacaaggtcaattgttaggggtatggtacttggtgctatatctaatgttgtagtgttacagtctaaaggacatgagacagaggaagtggatgctgttggcatattatcactttgttctttttcagtggatccagctgacacgtattgtaagtatgtagcagcaggtaaccaacctttaggtaactgtgttaaaatgttgacagttcataatggtagtggctttgctataacatcaaagccaagtccaactcctgatcaggattcttatggaggagcttccgtgtgtctctattgtagagcacatatagctcacccaggaagtgcaggaaatttagatggacgttgtcaatttaaaggttcttttgttcaaatacctactacggaaaaagaccctgtagggttctgtctacgtaacaaggtttgcactgtttgtcagtgttggataggtcatggatgtcaatgtgattcacttagacaaccaaaacctttggttcaatcagatgctggtgcatctggttttgataagaattatttaaacgggtacggggtagcagtgaggctcggctgataccccttgctaatggatgtgatcctgatgttgtaaagcgagcctttgatgtatgtaacaaggaatcagccggtatgtttctaaatttgaagcgtaattgtgcgcgattccaagaggttcgcgatactgaaggtggaaatcttgagtattgcgattcttattttgtggttaaacagaccactcctagtaattatgaacatgagaagtcttgttacgaagacttaaagtcagaagtaacggctgatcatgatttctttgtgttcaataagaacatttataatattagtaggcaacgacttactaagtatactatgatggacttttgttatgctttgaggcattttgacccaaaggattgcgaagtttttaaagaaatacttgtcacttatggttgtatagaagattatcaccctaagtggtttgaggaaaataaggattggtacgacccaatagaaaacccaaaatattatgctatgttggctaaaatgggccctattgttcgtcgagcactattaaatgctgttgagtttggaaacctaatggttgaaaagggttatgttggtgtggttacactagataaccaagacctcaatggcaaattttatgattttggtgattttcaaaaaacagcacctggtgctggtgttcctgtttttgatacatattattcttacatgatgcccatcatagccattacggatgctttagcacctgaacggtattttgaatatgatgtgcataagggttataagtcttatgatctcctcaagtatgattatacagaggagaaacaagaattgtttcagaagtactttaagtactgggatcaagagtaccaccctaattgttgtgattgtgcagacgataggtgtttgatacattgtgcaaacttcaatgtacttttctctacactgataccacagacttcttttggtaatttgtgtagaaaggtctttgttgatggtgtcccttttatagctacttgtggctatcattctaaggaacttggtgttattatgaatcaagataacaccatgtcattctcaaaaatgggcttaagccagcttatgaaatttgtaggagatcctgcccttttggtaggaacttctaacaatttggttgatcttagaacttcttgctttagtgtctgtgcattagcttctggtataacacaccagacagttaagccaggtcactttaataaagatttctatgattttgctgaaaaagcaggtatgtttaaggaagggtcatcaatcccacttaaacacttcttctatccacagactggtaatgctgctataaacgattatgattattatcgttataacaggcctactatgtttgatatacgccagcttctattctgtttagaggtgacgtctaaatattttgactgttatgaaggtggttgtataccagctagtcaagtggttgttactaaccttgataagagtgcaggctttccatttaataaatttggaaaagctcgtctttattatgaaatgagtctagaagagcaggaccaactctttgaaagtacaaagaaaaatgtcctacccactataactcagatgaatcttaaatatgccatatccgcgaaaaatagagcgcgtactgtggcaggtgtgtcaattctttctactatgactaatagacaatttcaccagaaggtgcttaagtctatagtcaatactagaaatgcttctgtagtaataggaacaaccaaattttatggtggttgggataatatgttaagaaaccttattcaaggtgtggaagacccaatgcttatgggttgggattatcctaagtgtgatagagcaatgccaaatttgttgcgtatagcagcgtctttggtgcttgcccgtaaacacaataattgttgcacatggtctgagcgcatttatagattgtacaatgagtgcgcccaagtattgtctgaaactgtattagctacaggtggtatttatgtaaagcctggtggtactagcagcggagatgctaccactgcttatgccaacagtgtttttaatataatacaagccacatctgctaatgttgcgcgtttgcttagtgttataacgcgtgatatagtatatgatgacattagaagcctgcagtatgaattataccagcaggtttatagacgagtcaattttgatgcagcctttgtcgaaaagttttattcttacatgtgtaagaatttttcattaatgatcttgtctgatgatggtgttgtttgttataacaacacacttgccaaacaaggtcttgtagcagatatttctggttttagagaaattctctactaccaaaataatgtttatatggcagattctaagtgctgggtggaaccagatttagaaaaaggcccacatgaattttgttcacagcacacaatgctagtagaggttgacggagagctaagatatttgccatatccagacccctcacgcatttttggtgcatgtgtttttgtagatgacgtggataaggctgggcctgtggctgttatggagcgttatatagctctcgccatagatgcttacccgcttgtacatcatgaaaatgaggagtataagaaagtcttctttgtactcctttcttatattagaaaactctatcaggagctctcccaaagtatgcttattgactactcctttgttatggatgtagacaagggtagtaagttttgggaacaggagttctatgagaatatgtacagagccccaacaaccttacaatcttgtggtgtttgtgtagtttgtaatagtcaaactatactacgctgtggtaattgtattagaaaaccattcttgtgttgtaaatgttgttatgaccatgtcatgtatactgaccacaaaaatgttttgtctataaacccatacatttgctctcaacctggttgtggtgaagcagatgttactaaactttacctcggaggtatgtcctacttctgtggtaatcataaacctaaattatcaataccgttagtatctaatggtactgtttttggaatttatagggccaattgtgtaggtagtgaaaatgttgatgattttaatcaactagctactactaattggtctaccgttgaaccttatatattagcaaatcgctgtagcgactcattaagacgctttgctgctgagactgtcaaagcaacagaagagttgcataaacagcaatttgctagtgcagaagtcagagaggttatttctgaccgtgaattaattctatcgtgggaacctggtaagactagacctcccttgaatagaaattatgttttcactggctatcactttaccaggacaagtaaggtacagctaggtgattttacttttgagaaaggtgaaggtagagatgttgtctattatagggcgacgtctacagctaaattgtctcctggagatatctttgtcttaacatcacacaatgttgtttctcttgtagcaccaactttgtgtcctcaacaaaccttttccaggtttgttaatttaagacctaatgtaatggtaccggagtgttttgttaataacattccattataccatttagtaggtaaacaaaagcgtactacagtacaaggccctcctggcagtggtaagtcacactttgccataggccttgctgcatactttagtaatgctcgtgttgtttttacagcatgttctcatgctgcagtagatgcgctttgtgaaaaagcgtttaaatttcttaaagttgatgattgcactcgcatagtacctcaaaggactactgttgactgcttctcaaaatttaaagctaatgacacaggcaaaaagtacatttttagtactattaatgccttgccagaagttagttgtgacattctgttggtagatgaggttagtatgttgaccaattatgaattgtcatttattaatggtaagataaattaccagtatgttgtgtatgtaggtgatcctgcccaattaccggcacctcgtactttgcttaatggttcactttcacctaaggattataatgtcatcacaaatcttatggtttgtgttaaacctgacattttccttgcgaagtgttatcgttgtcctaaagaaattgtagacactgtttctactcttgtctatgatggaaagtttgttgcaaataacccagagtcacgtgagtgtttcaaggttgtagttaataatggtaattctgatgtaggtcatgaaagtggttcagcctacaacacaacacagttggaatttgtgaaagattttgtttgtcgcaataaacaatggcgagaagcaacatttatttcaccttataacgccatgaatcagagagcctaccgcatgttgggacttaatgtccagactgtagactcatcacagggttcagagtatgattatgttatattctgtgtcactgctgattctcagcatgcgctgaatattaacagatttaatgttgcgcttacaagagctaagcgtggtatacttgttgtcatgcgtcagcgtgacgaattgtatgccgctcttaaatttacagagcttgatgctggggcaagcctgcaaggtacaggtttgtttaaaatttgcaataaggagtttagtggagtacatcctgcttatgctgtaaccactaaagcgcttgcggcaacgtacaaagttaatgacgaactagcagcacttgttaatgtagaagctggttcagaaataacttataagcatcttatttctctgttagggtttaagatgagtgttaatgttgaaggttgtcataacatgtttataacacgtgacgaggcaatccgcaatgtaagagggtgggtaggttttgatgtagaagccactcatgcttgtggtactaacattggaaccaaccttccatttcaagtaggattctctactggtgctgactttgtagtcacacctgagggtcttattgatacctcaataggcaataattttgagcctgtaaactctaaagcacccccaggtgaacaatttaatcacttgagagctttgtttaagagtgctaagccttggcatgttataagaccaaggatagttcagatgttagcagacaatctatgcaatgtttcagattgtgtagtgtttgtcacatggtgtcatggcctagaactaactactttgcgctattttgttaaaataggcaaggaacaagtttgttcttgtggttctagagctacaacttttaattctcacactcaggcttacgcttgttggaggcactgcttgggtgtctataatccacttttagtggatattcaacaatggggttactctggtaatctacagtttaatcatgatttgcattgtaatgtgcatggccacgctcatgtagcttcagctgatgctgtaatgacccgctgccttgcaattaataatgcattctgtaaagatgtcaactgggaactgcagtaccctcatattgcaaatgaggatgaagtaaattccagttgcaggtatctacaacgcatgtatcttaatgcgtgtgttgatgctcttaaagtcaatgttgtctatgatataggcaaccctaaaggtataaaatgtgttagacgtggggatgtcaattttaggttctatgataagaacccaattgtacctaacgtcaaacagtttgagtatgactatagtcagcataaagataagtttgctgatggtctttgtatgttttggaattgtaatgtggattgttatcctgaaaattcattagtttgtaggtatgacacacgaaatttgagtgtgtttaacctaccaggctgtaatggtggtagcctgtatgttaataaacatgcattccacacacctaagtttgatcgcattagctttcgtaatttgaaagctatgccatttttcttctatgattcatcgccttgcgaaaccattcaggttgatggagtagcgcaggaccttgtttcattagcaactaaagattgtatcacaaaatgcaacattggtggtgctgtttgtaagaaacacgctcaaatgtatgcagaatttgtgttttcatataatgcagctgtcacagctggttttactttttgggttactaataattttaacccttataatttatggaaaaatttttcagctctccagtctattgacaatattgcttttaatatgtataagggtgggcattacgatgctattgcaggcgaaatacccacagtcataactggagataaagtttttgttattgatcaaggtattgaaaaggcagtttttgttaatcaaacaactctgcctacatcagttgcatttgagttgtatgcgaaaagaaacattcgcacactgccaaacaacagaatattgagtggtttaggtgtagacgtgacccacggttttgtaatttgggattacgctaaccaaacaccattatatcgtaatactgttaaagtttgtgcatacacagacattgagcccaatggcttaatagttctgcatgatgatagatgtggtgattaccaatcttttcttgccgctgataatgctgttttagtgtctacacagtgttataagcggcatccttatgtagaaataccatcaaatctgcttattcagaatggtatgcctctaaaagatggagcgaacctgtatgtttataagaggagtaatggagcgtttgtgacgctaccaattacacttaacacacagggtcgtaattatgaaacttttgaacctcgtagtgatgttgagagagatttccttgacatgtctgaggatgattttgttgaaaagtatggtaatgacttaggtctacaacacatactttatggtgaagttgaaaaaccacaattgggtggtttacacactgttattggtatgtacaggctattgcgtgaaaataagttaagcgcaaaatctgtcactaactcagattcagatgtcatgcaaaattattttgtactgacagataatggttcttacaagcaagtttgtactgttgtagacctattgctagatgatttcttagaacttcttaggaacatacttaaagagtatggtactaataagtccaaagttgtaacagtgtctattgattaccatagcataaattttatgacttggtttgataatggcagtattaaaacatgttatccacagcttcaatcagcgtggacgtgtggttataatatgcctgaactctacaaggttcagaattgtgttatggaaccttgcaatattccaaactatggtgttggaattacattgccaagtggtattatgatgaatgtggcaaagtatacacaactttgtcagtatctttctaagactacaatgtgtgtgccgcataatatgcgtgtaatgcactttggagctggtagtgataaaggagtagcaccaggcagcactgttcttaagcagtggctgcctgagggaacactccttgttgataatgatattgtagattatgtatctgatgcacatgtttctgtgctttcagattgcaataaatataaaacagtgcacaagtttgaccttgtgatatctgatatgtatacagataatgattctaagggaaaacatgaaggcatagtagccaataatggcaatgacgatgtcttcatttatctatctaattttttaaagaacaacttagctcttggtggtagttttgccattaaagttacagagacaagttggcatgagagtttatatgacatcgcacaagattgtgcatggtggacaatgttttgtacagcagtaaatgcttcttcttctgaagcatttttactgggtattaattatttgggtgcaagtggaaaagtgaaagtaagtggaaaaactctgcacgcaaattatatattttggcggaattgtaattatttacaaacctctgcttatagtatatttgacgttgctaagtttggattaaaactaaaagcaacgccagttgtaaatttgaaaactgaacaaaagaccgacttagttgttaatctactaaggaacggcaagttattgattagagatgttggggaagtcactgtttttagtgaccattttgtgtgcactatgtag

SEQ ID NO: 20 - DNA, 27528 bp, Coronavirus
tgcactttagtgccctggatggcacctggccatctgtcaggttttagttattagattctattgttgctagtatcactgcttgttttgttgtgtctcactttatacatccgttgcttgggctacctagtgccagcgtcctgcagacgctgtggtcggttcgagtgcgaggaacctctggttcatctagcggtacgcgggtgtgtggaagtagcgcttcaggcgtacgtgttcctgttgcgtgtaacacggggtcacctccccccacattcctctaagggcttttgagcctagcgttgggctacgttctcgcataaggtcggctatacgacgtttgtagggggtagtgccaaacaacccctgaggtgacaggttctggtggtgtttagtgagcagacatacaatagacagtgacaacatggcttcaagcctaaaacagggagtatcttcccaaaaccagaggagtgtcgttcttgttgccaaagacattcccgaccaactccgtgacgctttgtttttctatacgtcacacaacccaaaggattacgctgatgctttcgcctataggcagaagtttgatcgtaatctgggggctgggaaaaagtttaaatttgaaactgtgtgtggttcattctttttgcaaggagtggacaaaataacacctggtgtcccagccaaagctttaaaagccacttctaggttggcagatttggaagacatctttggtgtctcacctctagcacggaaataccgtgaactccttaaaacagcatgccagtggtctctaacagtagaatcaatggatgctcgtgcacaaactcttgaagaaatctttgactcggctgaaatactttggcttcaggttgcagcaaagatccaggtttcggctatggcaatgcgcaggcttgttggtgaagtaactgcaaaggtcatggatgctttgggctcaagtctgagttctcttttccaaattgtgaaacagcaaatagtcagaatctttcaaaaggcactggctatttttgggaatgtgaaagatttgccacagcgtattgatgcactcaagatggcttttgccaagtgtgcaagatcaattacagttgtggttgttggacatgctctcactatcagagagtttgctggaacttgtcttgcaagcattaatggtgcagttgcaaaattctttgaagaacttccaactggttttatgggtgctaaggtcttttcaactcttgccttctttaaagaagcagcagcaaagatcgtagaaaacataccaaatgcgccaagaggtactaaaggtttcgaagtcgttggcaatgccaaaggtacacaagttgttgtccgtggcatgcgaaatgacttaactctgcttgatcaaaaagctgaagttcctgtggaaccagaaggttggtctgcaattttggagggacatctttgctatgtctttaagagtggtgatcgcttttatgcggcacctctttcaggaaattttgcattgcatgatgtgcattgctgcgagcgtgtagtctgtctgtctgatggtgtaacaccggagataaatgatgggcttgttcttgctgcaatttactcatcttttagtgtttcggaacttgtggcagcacttaaaaaaggtgaaccattcaagttcttggggcacaaatttgtttatgtgaaggaagcggcagtttctttcaccttggcaaaagcagcaaccattggagatgtcctgaagctgtttcaatcagcaagagtaaagacggaagatgtgtggtctgcacttactgaaaagtcttttgaattctggaaacttgcgtacagaagagtgcgcaatcttgaagaatttctgaagactcatttttgtaaagctcaaatgtcaattgtgatcctagcagcagtgcttggtgagggcatttggcatctttgttcacaagtcatctataaattgggtggtttgttttctaaagttgttgacttttgtgcaatacactggaaaggtttttgtgaacaattgaagaaggctaagcttcttgtcactgagcacctatgtgtcctgaaaggtgttgcacagcattgttttcaacttttgctggatgcaatacattctatgtacaagagttttaaaaagtgtgtacttggtagaatccatggagacttactcttttggaaaggaggtgtgcataaaattgtccaagaaggcgatgaagtttggttcgacaccatagatagtgttgatgttgaagatctgggtcgtgtccaggaaaaacctgtagattttgaggtttgtgatggtataacacttccagaaaatcaacctggtcatatggtccagtttgaagatgatggaaagaactatatgttcttccgcttcaaacgtgaggacagtgtttattacgcaccaatgtcacaacttggtgcaattaatgttgtttgcaaagcaggtggtaagactgtcacgtttggtgaaactacagtgcgagaaataccatcacctgatgtggtgcctattaaggttagcattgagtgttgtggtgaaccttggaacactatctttaagaaggcttataaagagcccattgaagttgaaacagacctcacagtagaacaattgctcgctgtgatctacgagaaaatgtgtgacgacctcaaattgttcccagaggctccagaacctccaccatttgagaatgtagcacttgttgataagaatggtaaagatttggattgcataaaatcatgctaccttatctaccgtgattatgagagtgatgatgacatcgaagaggatgacgctgaggagtgtgacacagcttcagataatgctgaggaatgtgaaacaacttcggagtgtgaagaagaggatgaaggtacaaaggtgttggctctcatacaagacccagcaagccaaaaataccctctgcctcttgatgatgattacagtgtctatagtggatgtatagtccataaagacgctctcgatgttgtgaatttaccatctggtgacgaaacttttgttatcaacaattgttttgatggcgctgtaaaagaactcccaaagtcagttgtagatgttctaagtgactggggtgcagccgtcgatgcacaggagaagtccttgaatgacgtagctgattccagtagtgtaccagtgccggaggaagatccggtagttagtactaatgtaattcatgaacaggaggtcattcctgttgtagaagaagagcaaagtgtcgttgtcttcacacctgctgaagtcgatgttataaaagaaacaccagatgaatttattctcattccggaagtttctgttgttgaagaagcaattcctgttagcagagaagatgaagtaacttcgcaacaggatgaatttaaagatttttctcgagttgaagatgcaagtggtgcacaacaggaagaatctaaaattgaagagcctcctcaagctgtaaaaacacaacgtgagaagagggctaagaagtttaaagtcaaagtaaccacacaaaaagctcctagttgtttggagtataaaacttgtgtgggtgatttaactgttgtgatagccaaggcattggatgagtttaaagagttctgtgttgtaaacgccgcaaatgagcatatgtctcatgggggtggcgttgcaaaagcaattgcagacttttgtggtccagattttgtggagtattgtgaagactatgttaagaaacatgggccacaacagagacttgtcacaccttcttatgttaaaggcattcaatgtgtgaacaatgttgtaggtccacgccatggggacagtgacttgtttcaaaaactggttactgcgtacaagaatgttattgttgatggcgtggtcaattatgttgtaccagttctctcatctggaatttttggagttgattttaaattgtcaatagatgctatgcgtgcggcctttgatggttgcaacatacgtgtccttctcttttctctgaatcaagaacacatcgaatatttcgatgcaacttgtaagcagaagacaatttatcttacagaagatggtgttaaataccgctctgtagttgtgaaacctggagactctttgggtcagtttggacaggtttttacaagacacaagactgtctttacggctgatgatgttgaagataaagaaattctctttgttccaactactgacaaggctgttcttgattattatggtttggatgcgaaaaagtatgtgatatatttacatacgctttcacaaaagtggaaaatcctagttaaggataattttattcaacttgagtggcgtgatggaaattgctgggttaattcagcaatagtaatccttcaggctgctaagattaagtttacaggttttcttgcaggagcatgggctgctctgttgggtggagatcccacagactttgtagcatggtgttatgcaagttgcaatgctaatgttggtgaattttcagacgctaattggctcttggccaatttggcagaacattttgatgtagattacacgaatgcacttcttaagaagtgtgtttcttgtaattgtggtgttaagagttatgagtttagaggccttgaagcttgcattcagccagtaaaggcacctaatctactacattttaaaacgcaatattcaaattgccccacttgtgattcaaatagtgtagatgaagttgtagaagcttctctcccatatttgcttcttctagcgacggatgggcctgctgcagtagattgtgatgatagtgctgcaggaaacatagtgttcataggttccactaacagtggtcattgttatacacaagccgttggtaaggcttttgataatcttgctagtgatagaaaatttggaaagaagtcgccttacattacagcaatgtatatccgcttctctcttaaaagtgaaaattctatgcctgttgctaacaagagcaaaggtaaaggtcaagtagtaaaagaagatgttgctaactttgctattagttcaaaagtcagttttgataatcttactgactttgagcagtggtatggtagtaacatttatgagagtcttaaagtgcaggaaacatctgacaatcttgatgattatgtgtcatttacaacaaaggaagattccacgttgccactgacacttaaagttcgtggtattaaatcagttgttgattttaagtcaaaggatggctttacttataaattaacacctgatattgatgaaaattcaaaggcacctgtttactacccagtcttagactctgttagtcttagagcaatttgggtagaaggtaatgctaattttgttgttggacatccaaattataatagtagagccttgcgaattcccactttgtgggattgtgcagagagttttgttaaaattggtgaaaaggttaatggtgttactatgggcctatggcgtgcagaacaccttaataaacccaatttggagacgcttttcaatatcgttaagaaaacgattgttggaactaatattgttactacccagtgtggtaaaataatttctaaggctacatcatttatagctgataaagtaggagatggtgtagttcgcaatgttactgatagaattaaagggtgttttgggtttactagggagcattttgaaagaagagtgtctccacagttcttaaaaaccctctttttcttcttcttctgtcttctgaaggctagtgctaagagtttaatgtctagctacaagagtgtgctacgtaaagtggtatttactgctttacttataatatggtttgtctacacaagcaacccagtaatgtttactgggatacgtgtgttagatttcctatttgaaggttcattctgtagtccttatgcagattacggcaaagaatcttttgatgttttacgctattgcggaagtgatttcacttgccgtgtttgtttacatggtagggattcgctacatttgtataaacatgcctatagcgtagaacagttttataaagatgcagttaatggcatcagttttacatggaattggctttatatgctgttcctaatactctttgttaagccagtggcaggttttgttattatttgctactgtataagatatttggttttaagcacaactgtattgcaaactggtgtaggatttttagactggtttattcaaacagtgtttgctaactttaattttatgggggcagggttttatttctggctcttttataagatatatatacaggtgcatcatataatgtactgtaaggatataacatgtgaagtttgtaagagagttgcgcgcagtaatagacatgaggttagtgtagttgttaatgggcgtaaacagcttgtccacgtctacactaactcaggttacagtttctgtaagagacataattggtactgtaagaattgtgacaagtatggtcatcaaaacacatttatgtctcctgaagttgctggtgagctttcagaaaagcttaaacgtcatgttaaacctacagcacatgcataccacgtagtggatgatgcatgcttagttgatgactttgttaatctgaagtacaatgctgccaccccaggtaaagaaggtgtgcattctgctgttaaatgttttagtgtatctgatttcttaaagaaagcagtctttcttaaggatgcacaaaaatgtgaacaaatatctaatgatagttttatagtttgtaatacacacagtgcgcatgcattagaggaagctaaaaatgcagccatctattatgcgcaatgtctttgtaaaccaattcttatacttgatcaggctctttatgaacaattgattgtagaacctgtgtctaagagtgttgtagacaaagtgtgtaatgttttgtctaatataatatctgtagattctgcagctttgaattataaggctggcacacttcgtgatgccctcctttctgttactaaggatgaagaagctgttgatatggctatcttctgccataacaatgatgttgaatatactaatgatggttttactaatgtggtgccatcatatggtatagacactgataagttaacacctcgtgatagaggctttttgataaatgcagatgctgccattgctaacttgaaagtgaaaaattcaccgccagtagtgtggaagtattctgaccttattaaactgtctgacagttgtcttaagtatttaatatcggcaactgtaaagtcaggaggtaggtttttcataacgaggtctggtgctaaacaagttattgcttgttatactcagaagttgttagtggaaaagaaggctggtggtgttgttagtaacactgttagttggtttaggagttgttgtaaatggctcttagtgttctatttactttttacagtgtgttgtttgggttactatcaatgggaaatgagtagagaatttcctcatcccatgtatgattttaattccacaatgcatgtagaagggtttaaggttatagataagggtgtacttagggatattatgccagaagacacttgcttctctaataagtatgttaattttgactcattttggggaaaaccttatgtaaatagtagagactgtcctattgtaaccgctattatagatggtgctggaacagtagctgctggttctcctggttttgtacagtgggtcatggatggtgtaatgtttatccatatgacacaaactgagcgaagaccttggtatattcctacttggtttaatagagaaattgttggttacactcatgattctattgttacagaaggtgagttttatacttccatagcattgtttgcttctagatgtttgtatttaacatctagtaacacaccacagctttattgctttaatggtgatagcgatgctcctggtgcattaccgtttgcaaatatactccctcatagggtatattttcaacctaatggagttaggcttattgtgcctcagcaaattatgcatacaccatacatagttagacttgtttcagatagctattgtagaggtagtgtttgtgaatatactaaaccgggttattgtgtttcaatgaattcccaatgggttttgtttaatgatgaatacacaagtaaaccaggtgtgttttgtggcgctactgttagagaacttttgtttagtatggttagtacattctttactggtgttaatccaaatatttatatgcaattggcaactatgttcttaatacttgttgctgttgttttagtttttgcaatggttataaagtttcaaggtgtttttaaagcttatgcaaccactgtatttactataatgcttgtttgggttattaatgcatttgtgttatgtgtgcatagttataataatgttttagctattatactacttgtgctttattgttatttatcacttgtgacgagtcgtaacactgctataataatgcactgttggcttgtcttcacatttggtttaatagtacctagttggatagcttgtgtctacttaggttttgtattatatatgtatacaccgctggttttgtggtgttatggtacaactaagaattgccgtaagctttatgaaggcaatgagtttgttggtaattatgacctcgctgcgaagagtacttttgtaattcgtggccctgaatttgttaaacttactaatgagataggcgataaatttgacgcctacctctcagcgtatgctagacttaaatactattcaggtactggcagtgagcaagattacttgcaagcctgccgtgcatggttggcttatgcactagatcaatttagaagcagtggtgtagaagtagtgtataccccaccacggtattctattggtgttagtagattacaggctggttttaagaaactagcagctcctagtagcgctgttgagaagtgcattgttagtgtgtcctataggggtaataatcttaatggattgtggttgggtgattctatttactgtccacgtcatgtgttaggtaagtttagtggtgatcaatgggatgacgtacttaatcttgctaataatcatgagtttgaagttgtaactggaaatggtgttactttggctgttgtcagtaggcgtttgagaggtgcagttttgattttacaaactgcaattgctaatgctgaaactccaaagtataaattcatgaaagcaaattgtggtgacagttttaccattgcttgctcttatggtggtacggttataggactttaccctgtcactatgcgttctaatgggactattagagcgtcttttcttgccggagcatgtggttcagtaggttttaatatagaaaggggtgtagtaaatttttactatatgcaccatctagaattgcctaatgcattacacactggaactgatctaaatggtgcgttctatggtggttgtgttgatgaggaggttgcacagagagtgccaccagataaccttgttactaacaacattgttgcatggctttatgctgcaattattagtgttaaagagagtagtttttcaacgcctaaatggcttgaaagtactactgtcagcgttgatgattataataagtgggctggtgataatggttttacaccgttttcaactagcactgctatcactaaattaagtgctataacgggagttgatgtttgtaaactccttcgcactattatggttaagtctagtcaatggggcaatgaacccattttaggccaatataattttgaggatgaactaacaccagaatctgtttttaaccaggttggtggtgtcagactacagtcttcttttgtgaaaagagctacatcttggttttggagtagatgtgtgttagcttgtttcttatttgttttgtgtgctattgttttgtttacggcagtgccacttaaatattatgtgcatgcagctgttgttttgttagcggctgttacatttatctcttttactgttaaacatgttatggcatatatggatactttccttttgccgacattgattacagttattattggagtttgtgctgaagtacccttcatttacaatactctaattagtcaaattgttattttctttagccaatggtatgatccagtagtgtttgatactatggtaccatggatgttcttaccattagtgctgtacacagcttttaagtgtgtacaaggttgctatagtgtaaattctttcaatacttctctgttagttttgtaccagtttatgaagttggggtttgttatctatacctcttctaacactgttactgcatactcggaaggtaattgggagctattctttgaattagtacacactactgtgttggctaatattagtagcaattccttaattggtttatttgtatttaagttggctaaatggatgctgtattattgtaatgcaacatactttaataattatgtgctaatggcagtcatggttaatggcttaggttggctctttacttgttactttgggttttattggtgggttaataaggtttttggtttaaccttaggcaaatataatttcaaagttccggttgatcaatataggtatatgtgtcttcataagataaaaccacctaaaactgtgtgggaagtcttttcgacaaatatacttatacaaggtataggtggtgagcgtgtgcttcctatagccacagttcaatctaaattaagtgatgtaaaatgcacaacagttgtcttaatgcagcttttgactaagcttaatgttgaagcaaattcaaaaatgcatgcttatcttgtagagttgcacaataaaattcttgcctctgatgatgttaatgagtgcatggataatttgttgggtatgcttgtaacactattttgtgtagatagtactattgatttaagtgagtattgtgatgatatacttaagagattaactgttttacagtcagttactcaggagttttcacacataccttcttatgcagaatatgaaagagctaaaaacctctatgaaagggtgttagctgattctaaaaatggtggtgttacacagcaagaacttgctgcatatcgtaaggctgccaatattgcaaagtcggtctttgatagagacttggctgtacaaaagaagttagatagcatggcagagcgcgctatgacaacgatgtataaggaagcgcgtgttactgatagaagagcgaaacttgtttcttcattacatgcgctgttattttctatgcttaagaagatagattctgaaaagcttaatgtactattcgaccaggcaagcagtggtgttgtgccactagctactgttcctatagtttgtagtaataagcttactcttgtagtgccagacccagaaacatgggtcaagtgcgtagagggcatgcatgttacatattcaacagttgtttggaatattgataatgttactgacgcagatggcactgaattgcaaccaatttctacaggtaatggtttaacatactgtataagtggtgataatatagcatggccccttaaggtcaatttgactaggaatgtgcataacaaagttgatgcagcattgcagaacaacgagcttatgcctcatggtgtaaaaacaaaggcatgcgtggcaggtgtagatcaagcacactgcagcgtagagtctaaatgttattatactaatattagtggtaattcagtagtggctgctattacctcctcaaatcctaatttgaaagtcgcctcatttttgaatgaagcaggcaaccaaatctacgttgacttagacccaccatgtaaatttggtatgaaggtgggtgataaagtagaagttgtttacttgtattttataaagaatacaaggtcaattgttaggggtatggtacttggtgctatatctaatgttgtagtgttacagtctaaaggacatgagacagaggaagtggatgctgttggcatattatcactttgttctttttcagtggatccagctgacacgtattgtaagtatgtagcagcaggtaaccaacctttaggtaactgtgttaaaatgttgacagttcataatggtagtggctttgctataacatcaaagccaagtccaactcctgatcaggattcttatggaggagcttccgtgtgtctctattgtagagcacatatagctcacccaggaagtgcaggaaatttagatggacgttgtcaatttaaaggttcttttgttcaaatacctactacggaaaaagaccctgtagggttctgtctacgtaacaaggtttgcactgtttgtcagtgttggataggtcatggatgtcaatgtgattcacttagacaaccaaaacctttggttcaatcagatgctggtgcatctggttttgataagaattatttaaacgggtacggggtagcagtgaggctcggctgataccccttgctaatggatgtgatcctgatgttgtaaagcgagcctttgatgtatgtaacaaggaatcagccggtatgtttctaaatttgaagcgtaattgtgcgcgattccaagaggttcgcgatactgaaggtggaaatcttgagtattgcgattcttattttgtggttaaacagaccactcctagtaattatgaacatgagaagtcttgttacgaagacttaaagtcagaagtaacggctgatcatgatttctttgtgttcaataagaacatttataatattagtaggcaacgacttactaagtatactatgatggacttttgttatgctttgaggcattttgacccaaaggattgcgaagtttttaaagaaatacttgtcacttatggttgtatagaagattatcaccctaagtggtttgaggaaaataaggattggtacgacccaatagaaaacccaaaatattatgctatgttggctaaaatgggccctattgttcgtcgagcactattaaatgctgttgagtttggaaacctaatggttgaaaagggttatgttggtgtggttacactagataaccaagacctcaatggcaaattttatgattttggtgattttcaaaaaacagcacctggtgctggtgttcctgtttttgatacatattattcttacatgatgcccatcatagccattacggatgctttagcacctgaacggtattttgaatatgatgtgcataagggttataagtcttatgatctcctcaagtatgattatacagaggagaaacaagaattgtttcagaagtactttaagtactgggatcaagagtaccaccctaattgttgtgattgtgcagacgataggtgtttgatacattgtgcaaacttcaatgtacttttctctacactgataccacagacttcttttggtaatttgtgtagaaaggtctttgttgatggtgtcccttttatagctacttgtggctatcattctaaggaacttggtgttattatgaatcaagataacaccatgtcattctcaaaaatgggcttaagccagcttatgaaatttgtaggagatcctgcccttttggtaggaacttctaacaatttggttgatcttagaacttcttgctttagtgtctgtgcattagcttctggtataacacaccagacagttaagccaggtcactttaataaagatttctatgattttgctgaaaaagcaggtatgtttaaggaagggtcatcaatcccacttaaacacttcttctatccacagactggtaatgctgctataaacgattatgattattatcgttataacaggcctactatgtttgatatacgccagcttctattctgtttagaggtgacgtctaaatattttgactgttatgaaggtggttgtataccagctagtcaagtggttgttactaaccttgataagagtgcaggctttccatttaataaatttggaaaagctcgtctttattatgaaatgagtctagaagagcaggaccaactctttgaaagtacaaagaaaaatgtcctacccactataactcagatgaatcttaaatatgccatatccgcgaaaaatagagcgcgtactgtggcaggtgtgtcaattctttctactatgactaatagacaatttcaccagaaggtgcttaagtctatagtcaatactagaaatgcttctgtagtaataggaacaaccaaattttatggtggttgggataatatgttaagaaaccttattcaaggtgtggaagacccaatgcttatgggttgggattatcctaagtgtgatagagcaatgccaaatttgttgcgtatagcagcgtctttggtgcttgcccgtaaacacaataattgttgcacatggtctgagcgcatttatagattgtacaatgagtgcgcccaagtattgtctgaaactgtattagctacaggtggtatttatgtaaagcctggtggtactagcagcggagatgctaccactgcttatgccaacagtgtttttaatataatacaagccacatctgctaatgttgcgcgtttgcttagtgttataacgcgtgatatagtatatgatgacattagaagcctgcagtatgaattataccagcaggtttatagacgagtcaattttgatgcagcctttgtcgaaaagttttattcttacatgtgtaagaatttttcattaatgatcttgtctgatgatggtgttgtttgttataacaacacacttgccaaacaaggtcttgtagcagatatttctggttttagagaaattctctactaccaaaataatgtttatatggcagattctaagtgctgggtggaaccagatttagaaaaaggcccacatgaattttgttcacagcacacaatgctagtagaggttgacggagagctaagatatttgccatatccagacccctcacgcatttttggtgcatgtgtttttgtagatgacgtggataaggctgggcctgtggctgttatggagcgttatatagctctcgccatagatgcttacccgcttgtacatcatgaaaatgaggagtataagaaagtcttctttgtactcctttcttatattagaaaactctatcaggagctctcccaaagtatgcttattgactactcctttgttatggatgtagacaagggtagtaagttttgggaacaggagttctatgagaatatgtacagagccccaacaaccttacaatcttgtggtgtttgtgtagtttgtaatagtcaaactatactacgctgtggtaattgtattagaaaaccattcttgtgttgtaaatgttgttatgaccatgtcatgtatactgaccacaaaaatgttttgtctataaacccatacatttgctctcaacctggttgtggtgaagcagatgttactaaactttacctcggaggtatgtcctacttctgtggtaatcataaacctaaattatcaataccgttagtatctaatggtactgtttttggaatttatagggccaattgtgtaggtagtgaaaatgttgatgattttaatcaactagctactactaattggtctaccgttgaaccttatatattagcaaatcgctgtagcgactcattaagacgctttgctgctgagactgtcaaagcaacagaagagttgcataaacagcaatttgctagtgcagaagtcagagaggttatttctgaccgtgaattaattctatcgtgggaacctggtaagactagacctcccttgaatagaaattatgttttcactggctatcactttaccaggacaagtaaggtacagctaggtgattttacttttgagaaaggtgaaggtagagatgttgtctattatagggcgacgtctacagctaaattgtctcctggagatatctttgtcttaacatcacacaatgttgtttctcttgtagcaccaactttgtgtcctcaacaaaccttttccaggtttgttaatttaagacctaatgtaatggtaccggagtgttttgttaataacattccattataccatttagtaggtaaacaaaagcgtactacagtacaaggccctcctggcagtggtaagtcacactttgccataggccttgctgcatactttagtaatgctcgtgttgtttttacagcatgttctcatgctgcagtagatgcgctttgtgaaaaagcgtttaaatttcttaaagttgatgattgcactcgcatagtacctcaaaggactactgttgactgcttctcaaaatttaaagctaatgacacaggcaaaaagtacatttttagtactattaatgccttgccagaagttagttgtgacattctgttggtagatgaggttagtatgttgaccaattatgaattgtcatttattaatggtaagataaattaccagtatgttgtgtatgtaggtgatcctgcccaattaccggcacctcgtactttgcttaatggttcactttcacctaaggattataatgtcatcacaaatcttatggtttgtgttaaacctgacattttccttgcgaagtgttatcgttgtcctaaagaaattgtagacactgtttctactcttgtctatgatggaaagtttgttgcaaataacccagagtcacgtgagtgtttcaaggttgtagttaataatggtaattctgatgtaggtcatgaaagtggttcagcctacaacacaacacagttggaatttgtgaaagattttgtttgtcgcaataaacaatggcgagaagcaacatttatttcaccttataacgccatgaatcagagagcctaccgcatgttgggacttaatgtccagactgtagactcatcacagggttcagagtatgattatgttatattctgtgtcactgctgattctcagcatgcgctgaatattaacagatttaatgttgcgcttacaagagctaagcgtggtatacttgttgtcatgcgtcagcgtgacgaattgtatgccgctcttaaatttacagagcttgatgctggggcaagcctgcaaggtacaggtttgtttaaaatttgcaataaggagtttagtggagtacatcctgcttatgctgtaaccactaaagcgcttgcggcaacgtacaaagttaatgacgaactagcagcacttgttaatgtagaagctggttcagaaataacttataagcatcttatttctctgttagggtttaagatgagtgttaatgttgaaggttgtcataacatgtttataacacgtgacgaggcaatccgcaatgtaagagggtgggtaggttttgatgtagaagccactcatgcttgtggtactaacattggaaccaaccttccatttcaagtaggattctctactggtgctgactttgtagtcacacctgagggtcttattgatacctcaataggcaataattttgagcctgtaaactctaaagcacccccaggtgaacaatttaatcacttgagagctttgtttaagagtgctaagccttggcatgttataagaccaaggatagttcagatgttagcagacaatctatgcaatgtttcagattgtgtagtgtttgtcacatggtgtcatggcctagaactaactactttgcgctattttgttaaaataggcaaggaacaagtttgttcttgtggttctagagctacaacttttaattctcacactcaggcttacgcttgttggaggcactgcttgggtgtctataatccacttttagtggatattcaacaatggggttactctggtaatctacagtttaatcatgatttgcattgtaatgtgcatggccacgctcatgtagcttcagctgatgctgtaatgacccgctgccttgcaattaataatgcattctgtaaagatgtcaactgggaactgcagtaccctcatattgcaaatgaggatgaagtaaattccagttgcaggtatctacaacgcatgtatcttaatgcgtgtgttgatgctcttaaagtcaatgttgtctatgatataggcaaccctaaaggtataaaatgtgttagacgtggggatgtcaattttaggttctatgataagaacccaattgtacctaacgtcaaacagtttgagtatgactatagtcagcataaagataagtttgctgatggtctttgtatgttttggaattgtaatgtggattgttatcctgaaaattcattagtttgtaggtatgacacacgaaatttgagtgtgtttaacctaccaggctgtaatggtggtagcctgtatgttaataaacatgcattccacacacctaagtttgatcgcattagctttcgtaatttgaaagctatgccatttttcttctatgattcatcgccttgcgaaaccattcaggttgatggagtagcgcaggaccttgtttcattagcaactaaagattgtatcacaaaatgcaacattggtggtgctgtttgtaagaaacacgctcaaatgtatgcagaatttgtgttttcatataatgcagctgtcacagctggttttactttttgggttactaataattttaacccttataatttatggaaaaatttttcagctctccagtctattgacaatattgcttttaatatgtataagggtgggcattacgatgctattgcaggcgaaatacccacagtcataactggagataaagtttttgttattgatcaaggtattgaaaaggcagtttttgttaatcaaacaactctgcctacatcagttgcatttgagttgtatgcgaaaagaaacattcgcacactgccaaacaacagaatattgagtggtttaggtgtagacgtgacccacggttttgtaatttgggattacgctaaccaaacaccattatatcgtaatactgttaaagtttgtgcatacacagacattgagcccaatggcttaatagttctgcatgatgatagatgtggtgattaccaatcttttcttgccgctgataatgctgttttagtgtctacacagtgttataagcggcatccttatgtagaaataccatcaaatctgcttattcagaatggtatgcctctaaaagatggagcgaacctgtatgtttataagaggagtaatggagcgtttgtgacgctaccaattacacttaacacacagggtcgtaattatgaaacttttgaacctcgtagtgatgttgagagagatttccttgacatgtctgaggatgattttgttgaaaagtatggtaatgacttaggtctacaacacatactttatggtgaagttgaaaaaccacaattgggtggtttacacactgttattggtatgtacaggctattgcgtgaaaataagttaagcgcaaaatctgtcactaactcagattcagatgtcatgcaaaattattttgtactgacagataatggttcttacaagcaagtttgtactgttgtagacctattgctagatgatttcttagaacttcttaggaacatacttaaagagtatggtactaataagtccaaagttgtaacagtgtctattgattaccatagcataaattttatgacttggtttgataatggcagtattaaaacatgttatccacagcttcaatcagcgtggacgtgtggttataatatgcctgaactctacaaggttcagaattgtgttatggaaccttgcaatattccaaactatggtgttggaattacattgccaagtggtattatgatgaatgtggcaaagtatacacaactttgtcagtatctttctaagactacaatgtgtgtgccgcataatatgcgtgtaatgcactttggagctggtagtgataaaggagtagcaccaggcagcactgttcttaagcagtggctgcctgagggaacactccttgttgataatgatattgtagattatgtatctgatgcacatgtttctgtgctttcagattgcaataaatataaaacagtgcacaagtttgaccttgtgatatctgatatgtatacagataatgattctaagggaaaacatgaaggcatagtagccaataatggcaatgacgatgtcttcatttatctatctaattttttaaagaacaacttagctcttggtggtagttttgccattaaagttacagagacaagttggcatgagagtttatatgacatcgcacaagattgtgcatggtggacaatgttttgtacagcagtaaatgcttcttcttctgaagcatttttactgggtattaattatttgggtgcaagtggaaaagtgaaagtaagtggaaaaactctgcacgcaaattatatattttggcggaattgtaattatttacaaacctctgcttatagtatatttgacgttgctaagtttggattaaaactaaaagcaacgccagttgtaaatttgaaaactgaacaaaagaccgacttagttgttaatctactaaggaacggcaagttattgattagagatgttggggaagtcactgtttttagtgaccattttgtgtgcactatgtagtgcaaatttgttcgatcctgccaattatgtgtactactaccaaagtgcctttaggccttcaaatgggtggcatttgcaagggggtgcttatgcagtagtgaattcttctaattatgctaataatgcaggttctgcatctgagtgcactgttggtgttattaaggatgtctataatcaaagtgcggcttccatagctatgacagcacctcttcagggtatggcttggtctaagtcacaattttgtagtgcacactgtgacttttctgaaattacagtttttgtcacacattgttatagtagtggatcagggtcttgtcctataacaggcatgattgcacgtggtcatattcgtatttctgcaatgaaaaatggttctttattttataatttaacagttagcgtatctaaataccctaattttaaatcttttcaatgtgttaacaacttcacatctgtttatttaaatggtgatcttgtttttacttccaacaaaactactgatgttacgtcagcaggtgtctattttaaagcaggtggacctgtaaattatagtattatgaaagaatttaaggttcttgcttactttgttaatggtacagcacaagatgtaattttgtgtgataactcccccaagggtttgctagcttgtcaatataacactggcaatttttcagatggcttttatccttttactaatagtactttagttagggaaaagttcattgtctatcgtgaaagtagtgttaatactactttggcgttaactaatttcacttttactaatgtaagtaatgcacagcctaatagtggcggtgttcatacttttcatttatatcaaacacaaacagctcagagtggttattataattttaatttgtcatttctgagtcagtttgtgtataaggcaagtgattatatgtatgggtcttaccaccctatttgtgcttttagaccagaaaccattaatagtggtttgtggtttaattccttgtcagtttctcttacttatggacccctacagggagggtataagcaatctgtttttagtggtaaggcaacgtgttgttatgcctactcttataatggcccaagggcatgtaaaggtgtttattcaggtgaattaagcagggattttgaatgtggattgctggtttatgttactaagagtgatggctctcgtatacagactagaacggagcccttagtattaacgcaacacaattataataatattactttagataagtgtgttgcctataatatatatggcagagtaggccaaggttttattactaatgtgactgattctgttgctaattttagttatttagcagatggtgggttagctattttagatacgtcgggtgccatagatgtttttgttgtacagggcagctatggtcttaattattacaaggttaatccttgtgaagatgttaaccaacagtttgtagtgtctggtggcaatatagttggcattcttacttctagaaatgaaacaggttctgaacaggttgagaaccagttttatgttaagttaaccaatagctcacatcgtcgcaggcgttctattggccaaaatgtaacaagttgtccttatgttagttatggcaggttttgtattgaaccagatggttcgttgaagatgatagtgccagaagaattgaagcagtttgtggcacctttacttaatattactgaaagtgtactcatacctaacagttttaatttgactgttacagatgagtacatacaaacacgtatggataaggtccaaatcaattgccttcaatatgtctgcggcaattctttggagtgtagaaaattgtttcaacaatatggtccggtttgtgataatatattgtctgttgtaaatagtgttagtcaaaaagaagatatggaacttttgagcttctattcttctactaaaccaaagggttatgatacaccagttcttagtaatgtaagcactggtgagttcaatatttctcttctcttgacaccccctagtagtcctagtgggcgttctttcgttgaagatcttctgtttacaagtgttgaaacagttggtttaccgactgatgctgaatacaaaaaatgcacagcgggacctttgggtacccttaaagatcttatctgtgctagggaatataatggtttattagtgttgcctccaatcattacggcggatatgcaaacaatgtataccgcgtctctagtaggtgctatggcttttggtggtattacatcagctgcagctataccttttgctactcagattcaggcaagaattaatcatcttggtattgcacagtctttgttaatgaaaaaccaagaaaagattgctgcttcctttaataaggccattggtcatatgcaggaaggttttagaagcacttcgctagcattacaacaggttcaagatgttgttaataagcagagtgctattcttacggaaactatgaattctcttaataagaattttggtgctatttcatcagtcattcaagacatttacgcgcaacttgatgcaattcaagcagatgcacaagttgatcgtcttataactggtaggctttcatcactctcagtgctagcttcagctaagcaatctgagtacattagagtttcccaacagcgtgaattagccactcaaaaaattaatgagtgtgttaaatcacaatctaatagatatggattttgtggtagtggaagacatgttctttcgatacctcaaaatgcacctaatggcatagtgtttattcactttacttatactccagaaacgtttgttaatgtgacagcaatagtcggtttctgtgtaaacccacttaatgctagtcagtatgccatagtacctgctaacggaaggggcatttttatacaagttaatggtacatactatatcacatctcgtgatatgtatatgccaagagacattactgcaggagatatagttacgcttacgtcttgtcaagcaaactatgttaatgtaaataaaaccgtcattactacatttgtagaagatgacgattttaattttgatgatgagttgtctaaatggtggaatgacactaagcacgggctaccagactttgacgacttcaattacacagtacccatacttaatattagcggtgaaattgataacattcaaggtgttatacagggtcttaatgactcccttataaaccttgaagaactttcaataattaaaacttatattaagtggccttggtatgtttggcttgccataggctttgctattattatttttatccttattttaggatgggtgtttttcatgacaggttgttgtggttgttgttgtggatgctttggtatcattcctctaattagtaagtgtggtaagaaatcttcttattacactacttttgataatgatgtggtaactgaacaatacagacctaaaaagtctgtttaatggttcaaactcccgcatcttttgtaatactatcaatttttctttggtttaaacttgcattaagttgtttcagtgagtgcattgtagcacttcaacagctaatacaagttttactccaaattattaataataatttacaatctaggctgctcctttggcacagcctagactaatgttagattttgagaaaataattggaacaggtgaacagtcagtacaacaaatcagtttcaatttacaatatatttcaagtgtcctaaaaactcaaatttttgacccatttgagtattgttattattcaagtggtagtttttatgaaatagagtcagctgacgattgttcagatgccgaatttattgaataaatcgctagaagagaacggtagttttctaacagccctttatatatttgtggtatttgtagcactttacctattaggtagagcactacaagcttttgtacaagcagctgatgcttgttgtttattttggtacacatgggtagtagttccaggagttaagggtacagcctttgtatacaagcatgcatatggtagaaaacttaacaatccggagttagaacacgttattgttaacgagtttcctaagaacggttggaataataaaagtctaccaaattttcaagatgtccaacgtgacaaattgcacccttgattctgatcaggctattctgctcttcaaggaatataatctatttataaccgcattcctattgtttataaccatactacttcagtatggatacgcaactaggagtcgggttatttacatactgaaaatgttagtgttatggtgcttttggcccattaacattgcagtaggtgtaatttcatgtatatatccaccaaatacaggaggtcttgtcgcagcgatagtacttactgtgtttgcgtgtttctcttttataggttattggattcagagcattagactctttaagcggtgtagatcttggtgggcatttaacccagaatcgaatgccgtaggttcaatactcctaactaatggtcaacaatgtaattttgctatagagagtgtgccaatggtgctttctcctattataaagaatggtgctctttattgtgagggtcagtggcttgccaagtgtgaaccagaccacttgcctaaggacatatttgtttgtactccggatagacgtaacatctatcgtatggtacagaaatacactggtgaccaaagcggaaataagaaaaggtttgctacatttgtctatactaaacagtcagtagatactggcgagcttgaaagtgtagcaacaggaggaagtagtctttacacataaatgtgtgtgtgtagagagtatttaaaattactctttaatagtgcctctattctaagagcgcataagagtatatattttgaggatcttaatataaatcccctttgtttcatactctcttttcaagagttattatttaaagagcagtttttccactcttttgtgccaaaaactattgttgttaacggtgtagcctttcaagtagagaatggaaaagtctactacgaaggaacacccatttttcagaaaggttgttgtaggttgtggtcccactataagagggattagaatacttaaaccacctacaacaattgtatttaaaaaaggtgtttgggtttacaaacgcttaagagaaacaaatacggaatgaaatggttgtctagtttaggaagagcattcattttctgttataaatccctattactaactcaacttagagttttagataggttagttttagagcacggtactagacgcagctttatatgtgctaggcgagtgcttttagttcaattagatttagtttataggttggcatatactcccaaccaatcgctggtatgaataatagtaaagataatccttttcgcggagcaatagcacgaaaagcgcgaatttatctgagaggaggattagattgtgtttactttcttaacaaagcaggacaagcagagccttgccccgcgtgcacatcactagtattccaggggaaaacttgtgaagagcacatacgtaataataacttgctatcatggcgagcggtaaagcagctggaaagtcagactcccccgcgccaatcatcaaactaggaggaccaaaaccaccaaaggtagggtcatctggaaatgcatcttggtttcaagccataaaggccaagaaactaaatgcacctgcacctaagtttgaaggtagtggtgttcctgataatgaaaatcttaaaaatagccagcagcacgggtactggaggcgccaagccaggtttaagccaggtaaaggcggaagaaaaccagtccctgatgcgtggtatttctattacactggaacaggaccagccgctgacctgaattggggtgattctcaagatggtatagtgtgggttgctgctaagggtgctgatgtgaaatctagatccaaccagggtactagagatcctgataagtttgatcaatacccactacggttttcagatggaggacctgatggtaatttccgttgggacttcattcctctgagtcgtggtaggagtggaagatcaaccgcagcatcatcagcggcatctagtagagtaccatcccgtgagggttcacgtggtcgtaggagtggagctgaagatgatctgattgcccgtgcagcaaagattattcaggaccagcagaggaagggtacgcgcattactaagcaaaaggcagaagagatggctcatcgccgattctgtaagcgtacggtgccaccaggttatagagtagatcaagtttttggccctcgtactaaaggtaaagagggtaattttggtgatgacaagatgaatgaggaaggtattaaggatgggcgtgttacagcaatgctcaaccttacaccaagcccacatgcttgtctttttggaagtagagtgacgcccaagcttcaaccagatgggcttcaccttagatttgaatttactactgtggtgcctagagatgacccgcagtttgataattatgtaaaaatttgtgatgagtgtgttgatggtgtaggaacacgtccaaaggacgaagttgtaagaccaaagtcacgcccaaattcaagacctgctacaagaacaagttctccagcgccaagacaacagcgtcaaaagaaggagaagaagtcaaagaagcaggatgatgaagtagataaggcattgacctcagatgaggagaggaacaatgcacagctggaatttgatgatgaacccaaggtgattaactggggggattcagcacttggagagaatgagttgtaaagctagatttccaacttaacatcatggacgtgcgtatgctgtttttccctactatagactttttagcatattattttttgctatttgtatggtttattacaggtgaagattgtatgtatttgttgtatactcgtatgttctatattatgttttctgtagttgttattagtgttgttcttgttcttattctactgttctcttttctttattttagagtatcaataagaatcaaggaagataggcatgtagtttgattacctacatgtctatcgccagggaaatgtctaatctgtctacttagtagcctggaaacgaacggtagacccttagattttaatttagtttaatttttagtttagtttaagttagtttagagtaggtataaagaagccagtgccggggccacgcggagtacgatcgagggtac

SEQ ID NO: 21 - DNA, 31028 bp, Coronavirus
gattgcgagcgatttgcgtgcgtgcatcccgcttcactgatctcttgttagatcttttcataatctaaactttataaaaacatccactccctgtagtctatgcctgtgggcgtagatttttcatagtggtgtctatattcatttctgctgttaacagctttcagccagggacgtgttgtatcctaggcagtggcccacccataggtcacaatgtcgaagatcaacaaatacggtctcgaactacactgggctccagaatttccatggatgtttgaggacgcagaggagaagttggacaaccctagtagttcagaggtggatatagtatgctccaccactgcgcaaaagctggaaacaggcggaatttgtcctgaaaatcatgtgatggtggattgtcgccgacttcttaaacaagaatgttgtgtgcagtctagcctaatacgtgaaattgttatgaatacacgtccatatgatttggaggtgctacttcaagatgctttgcagtcccgcgaagcagttttggttacaccccctctaggtatgtctctggaggcatgctatgtgagaggttgtaatcctaatggatggaccatgggtttgtttcggcgtagaagtgtgtgtaacactggtcgctgcgctgttaacaagcatgtggcctatcagctatatatgattgaccctgcgggtgtctgttttggtgcaggtcaatttgtgggttgggttatacccttagcctttatgcctgtgcaatcccggaaatttattgttccttgggttatgtacttgcgtaagtgtggcgaaaagggtgcctacaacaaagatcataaacgtggcggttttgaacacgtttataattttaaagttgaggatgcttacgacttggttcatgatgagcctaagggtaagttttctaagaaggcttatgctttaattagaggataccgtggtgttaaaccgcttctttatgtagaccagtatggttgtgattatactggtggtcttgcagatggcttagaggcttatgctgataagacattgcaagaaatgaaggcattatttcctatttggagccaggaactcccttttgatgtaactgtggcatggcacgttgtgcgtgatccacgttatgttatgagactgcaaagtgcttctactatacgtagtgttgcatatgttgctaaccctactgaagacttgtgtgatggttctgttgttataaaggaacctgtgcatgtttatgcggatgactctattattttacgtcaacataatttagttgacattatgagttgtttttatatggaggcagatgcagttgtaaatgctttttatggtgttgatttgaaagattgtggttttgttatgcagtttggttatattgactgcgaacaagacttgtgtgattttaaaggttgggttcctggtaatatgatagatggttttgcttgcactacttgtggtcatgtctatgagacaggtgatttgctagcacaatcttcaggtgttctgcctgttaatcctgtattgcatactaagagtgcagcaggttatggtggttttggttgtaaggattcttttaccctgtatggccaaactgtagtttattttggaggttgtgtgtattggagtccagcacgtaatatatggattcctatattaaaatcttctgttaagtcttatgacggtttggtttatactggagttgtaggttgcaaggctattgtaaaggaaacaaatctcatttgcaaagcgttgtaccttgattatgttcaacacaagtgtggcaatttacaccagcgggagttgctaggtgtgtcagatgtgtggcataaacaattgttattaaatagaggtgtgtacaaacctcttttagagaatattgattattttaatatgcggcgcgctaaatttagtttagaaacttttactgtttgtgcagatggttttatgccttttcttttagatgatttggttccgcgcgcatattatttggcagtaagtggtcaagcattttgtgactacgcagataaaatctgccatgctgttgtgtctaagagtaaagagttacttgatgtgtctctggattctttaagtgcagctatacattatttgaattctaaaattgttgatttggctcaacattttagtgattttggaacaagttttgtttctaaaattgttcatttctttaagacttttactactagcactgctcttgcatttgcatgggttttatttcatgttttgcatggtgcttatatagtagtagagagtgatatatattttgttaaaaacattcctcgttatgctagtgctgttgcacaagcatttcggagtgttgctaaagttgtactggactctttaagagttacttttattgatggcctttcttgttttaagattggacgtagaagaatttgtctctcaggcagtaaaatttatgaagttgagcgtggcttgttacattcatctcaattgccattagatgtttatgatttaaccatgcctagtcaagttcagaaagccaagcaaaaacctatttatttaaaaggttctggttctgatttttcattagcagatagtgtggttgaagttgttacaacttcacttacaccatgtggttattctgaaccacctaaagttgcagataaaatttgcattgtggataatgtttatatggccaaggctggtgacaaatattaccctgttgtggttgatggtcatgtaggactcttggatcaagcatggagggttccttgtgctggaaggcgtgttacatttaaggaacagcctacagtaaatgagattgcaagcacacctaagactattaaagttttttatgagcttgacaaagattttaatactattttaaacactgcatgtggagtgtttgaagtagatgataccgtggatatggaggaattttatgctgtggtgattgatgccatagaagagaaactttctccatgtaaggagcttgaaggtgtaggtgctaaagttagtgcctttttacagaaattagaggataattccctatttttatttgatgaggctggcgaggaagttcttgcttctaaattgtattgtgcttttacagctcctgaagatgatgactttcttgaagaaagtggtgttgaagaagatgatgtagaaggtgaggaaactgatttaactgtcacaagtgctggagagccttgtgttgccagtgaacaggaggagtcttctgaaatcttagaggacactttggatgatggtccatgtgtggagacatctgattcacaagttgaagaagatgtagaaatgtcggattttgctgatcttgaatctgtgattcaggattatgaaaatgtttgttttgagttttatactacagagccagaatttgttaaagttttggatctgtatgtgcctaaagcaactcgcaacaattgctggttgcgatcagttttggcagtgatgcagaaactgccctgtcaatttaaagataaaaatttgcaggatctttgggtgttatataagcaacagtatagtcagttgtttgttgataccttggttaataagatacctgctaatattgtagttccacaaggtggttatgttgccgattttgcatattggttcttaaccttatgtgattggcagtgtgttgcatactggaaatgcattaaatgtgatttagctcttaagcttaaaggcttggatgctatgttcttttatggtgatgttgtctcacatgtgtgcaagtgtggtgagtctatggtacttattgatgttgatgtgccatttacagcccactttgctcttaaagataagttgttttgtgcatttattactaagcgtagtgtgtataaagcagcttgtgttgtggatgttaatgatagtcattctatggctgttgttgatggtaaacaaattgatgatcatcgtgtcactagtattactagtgataagtttgattttattattgggcatggtatgtcattttcaatgactactttcgaaattgcccaattgtatggttcttgtataacacctaatgtatgttttgttaaaggtgatataattaaagtttctaagcgtgttaaagcagaagtcgttgtaaatcctgctaatggccatatggcacatggtggtggtgttgcaaaggctattgcagtagcagctggacagcagtttgttaaagagactaccgatatggttaagtctaaaggagtttgtgctactggagactgttatgtctctacagggggtaaattatgtaaaactgtgcttaatgttgttggacctgatgcgagaacacagggtaaacaaagttatgcattgttagagcgtgtttataaacatcttaacaaatatgattgtgttgttacaactttgatatcagctggtatatttagtgtgccgtctgatgtgtctttaacatatctacttggtactgccgagaaacaagttgttcttgttagcaataatcaagaggattttgatcttatttctaagtgtcagataactgccgttgagggcactaagaaattggcagagcgtctttcttttaatgtagggcgttctatcgtttacgaaacagatgctaataagttgattttaagcaatgacgttgcatttgtttcgacatttaatgtcttacaggatgttttatccttaagacatgatatagcacttgatgatgatgcacgaacctttgttcagagcaatgttgatgttgtacctgagggttggcgtgttgtcaataagttttatcaaattaatggtgttagaaccgttaagtattttgagtgtcccggtggcatagatatatgcagccaggataaagtttttggttatgtacagcagggtagttttaataaggctactgttgctcaaattaaagccttgtttttggataaagtggacatcttgctaactgttgatggtgtcaatttcactaacaggtttgtgcctgtaggtgaaagttttggtaagagtctaggaaatgtgttctgtgatggagttaatgtcacgaaacataagtgtgatataaattataaaggtaaagtctttttccagtttgataatctttctagtgaagatttaaaggctgtaagaagttcttttaattttgatcagaaggaattgcttgcctactacaacatgcttgttaattgttctaaatggcaggttgtttttaatggtaagtatttcacttttaagcaagctaataacaattgttttgttaatgtttcttgcttaatgctccagagtttgaatctgaaatttaaaattgttcaatggcaggaggcgtggcttgaatttcgttctggccgccctgctagatttgtatctttggttttagccaaaggtgggtttaaatttggtgatcctgctgactctagagatttcttgcgtgttgtgtttagtcaagttgatttgacaggggcaatatgtgattttgaaattgcatgtaaatgtggtgtaaagcaggaacagcgtactggtgtggacgctgttatgcattttggtacattgagtcgtgaagatcttgagattggttacaccgtggattgttcttgcggtaaaaagctaatccattgtgtacgatttgatgtaccatttttaatttgtagtaatacacctgctagtgtaaaattacctaagggtgtaggaagtgcaaatatttttaaaggtgataaggttggtcattatgttcatgttaagtgtgaacagtcttatcagctttatgatgcttctaatgttaagaaggttacagacgttactggcaatttgtcagattgtttgtatcttaaaaatttgaaacaaacttttaaatcggtgttaaccacctattatttggatgatgttaagaaaattgagtataaccctgacttgtcacaatattattgtgacggaggtaagtattatactcagcgtattattaaagcccaatttaaaacatttgagaaagtagatggtgtgtatactaattttaaattgataggacacaccatctgtgatattcttaatgctaagttgggttttgatagctctaaagagtttgttgaatataaagttactgagtggccaacagctacaggtgatgtggtgttggctactgatgatttgtatgttaagagatacgaaaggggttgtattacttttggtaaacctgttatatggttaagccatgagcaagcttccctcaattctttaacatattttaatagacctttattggttgatgagaataaatttgatgttttaaaagtggatgatgttgacgatggtggtgatatctcagagagtgatgccaaagaatccaaagaaatcaacattattaagttaagtggtgttaaaaaaccatttaaggttgaagatagtgtcatagttaatgatgatactagtgaaatcaaatatgttaagagtttgtctatagttgatgtgtatgatatgtggcttacaggttgtaggtatgttgttagaactgctaatgctttgagcatggcagttaacgtacctacaatacgtaagtttataaaatttggtatgactcttgttagtataccaattgatttgttaaatttaagagagattaagcctgtttttaatgtggttaaagctgtgcgaaataaaatttctgcatgctttaattttattaaatggctttttgtcttattatttggctggattaaaatatccgctgataataaagtaatttacaccacagaagttgcatcaaagcttacatgtaagcttgtagctttagcttttaaaaatgcgtttttgacatttaagtggagtgtggttgctagaggtgcttgcattatagcgactatatttctattgtggtttaattttatatatgccaatgtaatttttagtgatttttatttgcctaaaattggtttcttgccgacttttgttggtaagatcgcacagtggattaagagcacttttagtcttgtaactatttgtgatctatattccattcaggatgtgggttttaagaatcagtattgtaatggaagtatcgcatgtcaattctgcttggcaggatttgatatgttagataattataaagccattgatgtagtacagtatgaagctgataggagagcatttgttgattatacaggtgtgttaaagattgtcattgaattgatagttagttacgccctgtatacggcatggttctacccattgtttgctcttattagtattcagatcttgaccacttggctgcctgagctttttatgcttagtacattacattggagtgttaggttgctggtgtctttagctaatatgttaccagcacatgtgtttatgaggttttatattattattgcctcttttattaagctgtttatcttgtttaggcatgttgcctatggttgtagtaaacctggttgtttgttttgttacaagaggaatcgtagtctacgtgttaaatgtagtactattgttggtggcatgatacgctattacgatgttatggctaatggtggcactggcttttgttcaaaacatcaatggaattgcattgattgtgattcttataaaccaggtaatacttttattactgttgaggccgctcttgatttatctaaggaattgaaacggcctattcagcctacagatgttgcttatcatacggttacggatgttaagcaagttggttgttatatgcgcttgttctatgagcgtgatggacagcgcacatatgatgatgttaatgctagtttgtttgtggattatagtaatttgctacattctaaggttaagggtgtgcctaatatgcatgttgtggtagtggaaaatgatgccgataaagctaattttcttaatgctgctgtattttatgcacagtctttgtttagacctattttaatggttgataaaaatctgataactactgctaatactggtacgtctgttacagaaactatgtttgatgtttatgtggacacatttttgtctatgtttgatgtggataaaaagagtcttaatgctttaatagcaactgcgcattcttctataaaacagggtacgcagatttgtaaagttttggatacctttttaagctgtgctcgtaaaagttgttctattgattcagatgttgatactaagtgtttagctgattctgtcatgtctgctgtatcggcaggccttgaattgacggatgaaagttgtaataacttggtgccaacatatttgaagggtgataacattgtggcagctgatttaggtgttctgattcaaaattctgctaagcatgtgcagggtaatgttgctaaaatagccggtgtttcctgtatatggtctgtggatgcttttaatcagctaagttctgatttccagcataaattgaagaaagcatgttgtaaaactggtttgaaattgaagcttacttataataagcagatggctaatgtctctgttttaactacaccctttagtcttaaagggggtgcagtttttagttattttgtttatgtatgttttctgttgagtttggtttgttttattggattgtggtgcttaatgcccacttacacagtacacaaatcagattttcagcttcccgtttatgccagttataaagttttagataatggtgttattagagatgttagcgttgaagatgtttgtttcgctaacaaatttgaacaatttgatcaatggtatgagtctacatttggtctaagttattatagtaacagtatggcttgtcccattgttgttgctgtagtagaccaggatcttggctctactgtgtttaatgtccctaccaaagtgttacgatatggttaccatgtgttgcactttattacacatgcactttctgctgatggagtgcagtgttatacgccacatagtcaaatatcgtattctaatttttatgctagtggctgtgtgctttcctccgcttgtactatgtttgcaatggccgatggtagtccacaaccttattgttatacagaggggcttatgcagaatgcttctctgtatagttcattggtacctcacgtgcggtataatcttgctaatgctaaaggttttatccgttttccagaagtgttgcgagaaggacttgtgcgtattgtgcgtactcgttctatgtcgtattgcagagttggattatgtgaggaagctgatgagggtatatgctttaactttaatggttcttgggtgcttaataatgattattatagatcattgcctgggaccttttgtggtagagatgtttttgacttaatttatcagctttttaaaggtttagcacagcctgtggatttcttggcattgactgctagttctattgctggtgctatacttgctgtaattgttgttttggtgttttattacttaataaagcttaaacgtgcttttggtgattacaccagtattgtttttgtcaatgtgattgtgtggtgtgtaaattttatgatgctttttgtgtttcaagtttaccctacactttcttgtgtatatgctatttgttatttttatgccacgctttatttcccttcggagataagtgtgataatgcatttacaatggctagttatgtatggcactattatgcctttatggttttgtttgctatatatatctgttgttgtttcaaatcatgctttttgggtattcgcttactgcagacggcttggtacttctgttcgtagtgatggtacatttgaagaaatggctcttactacttttatgattacaaaagattcttattgtaagcttaagaattctttgtctgatgttgcttttaatagatatttgagtttgtataataaatataggtattacagcggtaaaatggatactgctgcatatagggaggctgcttgttcgcagttggctaaagcaatggatacatttaccaataataatggtagtgatgtgctttaccaaccacctactgcttccgtttcaacttcattcttgcaatctggtattgtgaaaatggttaatcctacttctaaggtagaaccatgtattgtcagtgttacctatggtaatatgacattgaatggtttatggttggatgataaggtctactgtcccagacatgtgatatgttctgcttcagatatgactaatccagattatacaaatttgttgtgtagagtaacatcaagtgattttactgtattgtttgatcgtttaagccttacagtgatgtcttatcaaatgcagggttgtatgcttgttcttacagtgaccctgcaaaattctcgtacgccaaaatatacatttggtgtggttaaacctggtgagacttttactgttttagctgcttataacggcaaaccacaaggagcctttcatgtgactatgcgtagtagttataccattaagggttcctttttatgcggatcttgtgggtctgttggttatgtgctaatgggtgattgtgttaaatttgtgtatatgcatcaattggagcttagtactggttgtcatactggtactgatttcaatggggatttttatggtccttataaggatgctcaggttgtccaattgcccgttcaggattatatacaatctgttaattttgtagcatggctttatgctgctatacttaataattgtaattggtttgtacaaagtgataagtgttctgttgaagattttaatgtgtgggctttgtctaatgggtttagccaagttaaatctgatcttgttatagatgctttagcttctatgactggtgtgtctttggaaacattattggctgctattaagcgtctcaagaatggttttcaaggacgtcagattatgggtagttgctcctttgaggatgaattgacacctagcgatgtttatcaacaactcgctggtatcaagttacaatcaaagcgtactagattggttaaaggcattgtttgttggattatggcttctacatttttgtttagttgtataattacagcatttgtgaaatggactatgtttatgtatgtaactactaatatgcttagtattacgttttgtgcactttgtgttataagtttggccatgttgttggttaaacataagcatctttatttgactatgtatataattcctgtgctttttacactgctgtataacaactatttggttgtgtacaagcagacatttagaggctatgtttatgcatggctatcatattatgttccatcagttgagtatacttatactgatgaagttatttacggcatgttattgcttataggaatggtctttgttacattacgtagcattaaccatgatttgttttcttttataatgtttgttggtcgtgtgatttctgttgtctctttgtggtacatgggttctaacttagaggaagaaattcttcttatgttggcttctctttttggtacttacacatggacaacagctttatctatggctgcagcaaaggttattgctaagtgggttgctgtgaatgttttgtatttcacagatatacctcaaattaagatagttcttgtatgctatttgtttataggttatattattagctgttattggggtttgttttccttgatgaacagtttgtttagaatgcctttgggtgtttataattataaaatttcagtacaggaattaagatatatgaatgctaatggattgcgccctcctaagaatagttttgaagcccttatgcttaattttaagcttttgggtattggaggtgtgccaattattgaagtatctcaatttcaatcaaaattgactgatgttaaatgtgctaatgttgtcttgcttaattgcttgcaacatttgcatgttgcttctaattctaagttgtggcagtattgtagcactttgcacaatgaaatacttgccacttctgatctgggtgttgcttttgaaaagcttgctcagttgttaattgttttgtttgctaatccagctgctgtggatagcaagtgcctgactagtattgaagaagtttgcgatgattacgcaaaggacaatactgttttgcaggctttacagagtgaatttgttaatatggctagcttcgttgaatatgaagttgctaagaaaaatcttgatgaggcgcgttctagtggttctgctaatcaacagcagttaaaacagctagagaaagcctgtaatattgctaaatctgcttatgaacgcgaccgtgctgtagcaagaaagttggagcgtatggcagatttggctctcactaatatgtataaagaagctagaattaatgataagaagagtaaggttgtttctgccttgcaaactatgctttttagtatggtgcgtaagttagataatcaagctctgaattcaatattagataatgctgtgaagggttgtgtaccattgaatgcaatcccttcattggctgcaaatactctgactataattgtaccagataaaagtgtttacgatcaggtagttgacaatgtctatgttacctatgcgggtaatgtatggcagattcaaactatccaagattcagatggtacaaataagcagttgaatgagatatctgatgattgtaactggccactagttattattgcaaatcggcataatgaggtatctgcaaccgttttgcaaaataatgaattaatgcctgctaagttgaaaactcaggtcgttaatagtggtccagatcagacttgtaacacacctactcaatgttactataataatagtaacaatgggaagattgtttatgctatacttagtgatgttgatggtcttaagtatacaaagattcttaaagatgatggcaattttgttgttttggagttagatcctccttgtaaatttactgttcaagatgttaaaggtcttaaaattaagtacctttattttgtaaaaggttgtaacacactagcaagaggctgggttgttggtacaatttcttctacagttagattgcaagctggaactgctactgagtatgcttccaactcatctatattatctttatgtgcgttttctgtagatcctaagaaaacgtatttagattttatacagcagggaggaacacctattgccaattgtgttaaaatgttgtgtgaccatgctggtaccggtatggccattactgttaaacccgatgctaccactaatcaggattcatatggtggtgcgtctgtttgtatatattgccgcgcacgagttgaacacccagatgttgatgggttgtgcaaattacgcggcaagtttgtacaagtgcctgtaggtataaaagatcctgtgtcttatgttttgacacatgatgtttgtcaagtttgtggattttggcgggatggaagttgttcatgtgttagcactgacactactgttcagtcaaaagatactaattttttaaacgggttcggggtacgagtgtagatgcccgtctcgtaccctgtgccagtggtttatctactgatgtacaattaagggcatttgatatttgcaatgctagtgttgctggcattggtttacatttaaaagttaattgctgccgttttcagcgtgttgatgagaacggtgataaattagatcagttctttgttgttaagaggacagatctgactatatataatagagagatggaatgctatgagcgtgtaaaagattgtaagtttgtggctgaacacgatttctttacatttgatgtagaaggtagtcgtgtgccacatattgtacgcaaggatttaacaaagtatactatgttggatctttgctatgcgttgcgacattttgatcgcaatgattgcatgctgctttgtgacattctctctatatatgctggttgtgaacaatcctactttactaagaaggattggtatgattttgttgaaaatcctgatattattaatgtttataaaaagctaggacctatttttaatagagccctagttagcgctactgagtttgcagacaaattggtggaggtaggcttagtaggcattttaacacttgataaccaagatttaaatggtaaatggtatgattttggtgactatgttattgcagccccaggttgtggtgttgctatagcagactcttattattcttatatgatgcctatgctgaccatgtgtcatgcattggattgtgaattgtatgtgaataatgcttatagactatttgatcttgtacagtatgattttactgattacaagctcgaattgtttaataagtattttaagcactggagtatgccataccatcctaacacggttgattgtcaggatgatcggtgtatcatacattgtgctaattttaacatactttttagtatggttttacctaatacatgttttgggcctcttgttaggcaaatttttgtggatggtgttccttttgttgtttcaattggataccattataaagaacttggtattgtgatgaatatggatgtggatacacatcgttatcgcttgtctttaaaagacttgcttttatatgctgctgatccagctttgcatgtagcttctgctagtgcattgtatgatttacgcacttgctgttttagtgttgcggctataacaagcggtgtaaaatttcaaacagttaaacctggtaattttaatcaggatttttatgattttattttaagtaagggcctgcttaaagagggtagttcagttgatctgaagcactttttctttacgcaggatggtaatgctgctatcactgattataattattataagtacaatttgcccaccatggtggacattaagcagttgttgtttgttttggaagttgtttataagtattttgagatttatgatggtgggtgtataccggcatcacaagtcattgttaataattatgataagagtgctggctatccatttaataaatttggaaaagccaggctctattatgaagcattatcatttgaggagcaggatgaaatttacgcctatactaagcgcaatgtcctgccaacacttactcaaatgaatttgaaatatgctattagtgctaagaatagagcccgcactgtcgctggtgtttccatacttagtactatgactggcagaatgtttcatcaaaagtgtttgaaaagtatagcagctacacgtggtgttcctgttgttataggcaccactaaattttatggcggctgggatgatatgttacgtcgccttattaaagatgttgataatcctgtacttatgggttgggattatcctaagtgtgatcgtgctatgccaaacatactacgtattgttagtagtctggttttggctcgaaaacatgaggcatgttgttcgcaaagcgataggttttatcgacttgcgaatgaatgcgcacaagttctgagtgaaattgttatgtgtggtggctgttattatgttaagcctggtggcactagtagtggtgatgcaactactgcttttgctaattcagtttttaacatatgtcaagctgtttcagccaatgtatgtgctttaatgtcatgcaatggtaataagattgaagatttgagtatacgtgctcttcagaagcgcttatactcacatgtgtatagaagtgatatggttgattcaacctttgtcacagaatattatgaatttttaaataagcattttagtatgatgattttgagtgatgatggcgttgtgtgttataattctgactatgcgtccaaagggtatattgctaatataagtgcctttcaacaggtattgtattatcaaaataacgtttttatgtcagaatccaaatgttgggttgaaaatgacataaataatggacctcatgaattctgttcacaacacacaatgcttgtaaagatggatggggacgatgtctatcttccatatcctgatcctagtcgtatattaggagctggatgttttgtagatgatttgttaaagactgatagtgttcttttaatagaacgatttgtaagtcttgcaatagatgcttatccacttgtgtaccacgaaaatgaagaataccaaaaggtttttcgtgtttatttggagtatataaagaagttgtacaatgacctgggtaatcagatcttggatagctacagtgttattttaagtacttgtgatggacaaaagtttactgatgagtccttttacaagaacatgtatttaagaagtgcagttatgcagagtgttggagcttgcgtggtctgctcttctcaaacatcattacgttgtggcagttgcatcagaaagcctcttctttgctgcaagtgttgttacgatcatgttatggcaactgatcataaatatgttttgagtgtttcaccatatgtgtgtaatgcaccaggatgtgatgtaaatgatgttaccaaattgtatctaggtggtatgtcatattattgtgaagatcataagccacaatattcgtttaagttggtaatgaatggtatggtttttggtctatataaacaatcttgtacaggatctccgtacatagatgattttaatcgtatagctagttgtaaatggactgatgttgatgattacatactggctaatgaatgtacagagcgcttgaaattgtttgctgcagaaacgcaaaaggcgactgaggaagcctttaagcagagttatgcatcagcaacaatacaagagattgttagcgagcgcgaattgatcctctcttgggagattggaaaagtgaagccaccacttaataaaaattatgtttttactggctaccattttactaaaaatggcaagacagttttaggtgagtatgtttttgataagagtgagttgactaatggtgtgtattatcgcgccacaaccacttataagctatctgttggagatgtttttgttttaacctctcattcagtagctaatttaagtgctcctacgctggtgccgcaggagaattatagtagtattagattcgctagtgtttatagtgtgcttgagacgtttcagaacaatgtcgttaattatcaacacattggtatgaaacgttattgcaccgtgcaaggacctcctggtacaggaaagtcacatcttgctattggtcttgctgtttattattgtacagcacgtgtagtatacactgcggccagccatgcagctgttgacgcattgtgtgaaaaagcatacaaatttttgaatataaatgactgcactcgtattgttcctgccaaggtcagggtggagtgctatgataagtttaaaattaatgacaccactcgtaagtatgtgtttactactataaatgcattacctgagatggtgactgatattgttgttgtagatgaagttagtatgcttaccaattatgagctttctgttattaatgctcgtattcgtgctaagcattatgtttacattggtgatcctgctcaattgccagcaccacgtgtgttattgagcaagggtacacttgaacctaaatattttaacactgttactaagcttatgtgttgcttagggccagacatttttcttggtacatgttatagatgtcctaaggaaattgttgatacagtgtctgccttggtttatgaaaataagcttaaggctaagaatgaaagtagttcattgtgttttaaggtctattataaaggcgttacaacacatgaaagttctagtgctgtaaatatgcagcagatttatttgattaataagtttttgaaggctaaccctttgtggcataaagccgtttttattagcccatataatagccagaactttgcagctaagcgtgttttgggtttgcaaacccagaccgtggattctgctcaaggttctgaatatgattatgttatatattcacagactgcagaaacagcgcattctgtaaatgttaatcgcttcaatgttgctattactcgagccaagaaaggtattctttgtgttatgagtaatatgcagttgtttgaagcattacagtttactacattgaccttagataaagtgccacaggccgttgaaacgagagttcaatgtagtaccaatttatttaaagattgtagcaagagttatagtggttaccacccagctcacgctccttcatttttggcagtagatgacaaatataaggcaactggcgatttagccgtgtgtcttggtattggagattctgctgttacatattcaagattaatatcactcatgggttttaaacttgatgtcacccttgatgggtattgtaagctttttataactaaagaagaagctgttaaacgcgtgcgtgcttgggttggctttgatgctgaaggcgctcatgccacgcgtgatagcattgggacaaatttcccacttcaattagggttttctacaggaattgattttgttgtggaagccactggtttgtttgctgatagagatggttacagctttaaaaaggctgtggctaaagctcctcctggtgaacaatttaagcatctcatccctttgatgacgagaggtcagcgctgggatgttgttagacctagaatagtacaaatgtttgcagatcatttaattgatctgtctgattgtgttgtgctagttacatgggcagccaactttgagctcacttgtctccgatactttgcaaaagtaggtcgtgagatctcttgtaatgtgtgcactaaacgtgccacagcttacaattctagaactggttactatggttgttggcgccatagtgttacatgtgattacttgtataatccacttattgttgatattcaacagtggggatatattggatctttatcaagtaatcatgatttatattgtagtgtccacaaaggagcacatgttgcttcatctgatgctataatgacacggtgtttggccgtttatgattgtttttgcaataatattaattggaatgtggagtatcccattatttcaaatgagttaagtattaatacctcttgtagggtcttgcagcgtgttatgcttaaagctgcaatgctctgcaacagatatactttgtgttatgatattggcaacccaaaagcgattgcctgtgtcaaagattttgattttaagttctatgatgcccaaccaattgttaagtctgtcaagactcttttgtattcttttgaggcacataaggactcttttaaagatggtttgtgtatgttttggaactgtaatgtggataagtatccaccgaatgcagttgtatgtagatttgacacgagagtgttgaataatttaaatcttcctggctgtaatggaggtagtttgtatgttaataaacatgcattccacactaaacccttttctagggcagcctttgagcatttgaagcctatgccatttttctattattcagatacgccttgtgtgtatatggatggcatggatgctaagcaggttgattatgtacctttgaaatccgccacttgcatcacaagatgcaatttaggtggtgcagtttgtttaaaacatgctgaagagtatcgtgagtacctagagtcttacaatacagctactacagcaggttttactttttgggtctataagacatttgatttttataatttgtggaatacgttcaccaagctacaaagcttggagaacgttgtatataatttagtcaaaactggtcattatacaggacaggctggtgaaatgccttgtgccattataaatgataaagtcgtggctaagatcgataaggaggatgttgtcatttttattaataatacaacataccctactaatgttgctgttgaattatttgccaagcgcagtattcgacaccatccagagcttaagctctttagaaatttgaatatagacgtgtgttggaagcacgtcatttgggattatgctagagaaagtatattttgcagtaatacctatggtgtctgcatgtatacagatttaaagttcattgataaattgaatgtcctttttgatggtcgtgataatggtgctcttgaagcttttaaacgctctaataatggcgtttacatttccacgacaaaagttaagagtctttcgatgataaaaggtccaccgcgtgctgaattaaatggcgtagtggtggacaaggttggagacactgattgtgtgttttattttgctgtgcgtaaagagggtcaggatgtcatcttcagccaattcgacagcctgagagtcagctctaaccagagcccacaaggtaatctggggagtaatgaacccggtaatgtcggtggtaatgatgctctggcaacctccactatctttacacaaagccgtgttattagctcttttacatgtcgtactgatatggaaaaagattttatagctttagatcaagacttgtttattcagaagtatggtttggaggactatgcctttgaacacattgtttatggtaatttcaaccagaagattattggtggtttgcatttgttaataggcttgtaccgaagacagcaaacttccaatctggttattcaggagtttgtttcatacgactccagcatacactcttattttatcactgatgagaagagtggtggtagtaagagtgtttgcactgttatagatattttgttggatgattttgtggctcttgttaagtcacttaatctcaactgtgtgagtaaggttgttaacgttaatgttgattttaaagattttcagttcatgctttggtgtaacgatgagaaagttatgactttctatcctcgtttgcaagctgcatctgactggaagcctggttattctatgcctgtattatacaagtatttgaattccccaatggaaagagttagtctctggaattatgggaagccggttactttgcctacaggctgtatgatgaatgttgctaagtatactcagttatgtcaatatctgaatactacaacattagctgtacctgttaatatgcgagttttgcatttaggtgcaggttcagaaaaaggagtagcaccgggttctgcagttcttaggcagtggttgcctgctggtactattcttgtagataatgatttatacccatttgtgagtgacagtgtcgctacatattttggggattgtataaccttaccctttgattgtcaatgggatttgataatttctgatatgtatgaccctattactaagaacataggggagtacaatgtaagtaaagatggtttctttacatacatttgtcatatgattcgcgacaagttagctctgggtggcagtgttgctataaaaataacagagttttcttggaatgcagaattatataagttaatggggtattttgcattttggacggttttctgcacaaatgcaaacgcttcttctagtgaagggtttttaattggcataaattatttgggtaagcccaaggttgagatagatggaaatgttatgcatgccaattatttgttttggagaaattccacagtttggaacgggggtgcttatagcctgtttgacatggctaaattcccgcttaagttggctggtactgccgtaataaatttaagagcagaccagattaatgatatggtttattcccttcttgaaaagggtaaactacttgttagagatacaaataaagaagtttttgttggtgacagtttggttaatgtaatctaaactttaagaatggcagtcgcttatgcagacaagcctaatcactttatcaattttccacttacccagtttcagggctttgtgttaaattataaaggtttacaatttcaacttctcgatgaaggagtggattgtaaaatacaaacagcgcctcacattagtcttgctatgctggatattcagcctgaagactacagaagtgttgatgttgctattcaagaagttattgatgatatgcattggggtgagggctttcagattaaatttgaaaacccccatatcctaggaagatgcatagttttagatgttaaaggtgtagaagaattgcatgatgatttagttaattacattcgtgataaaggttgtgttgctgaccaatccaggaagtggattggacattgcaccatagcccaactcactgatgctgcactttccattaaggaaaatgttgattttataaacaacatgcaattcaactataaaatcactatcaatccctcatcaccggctagacttgaaatagttaagcttggtgctgaaaggaaagatggtttttatgaaaccatagctagccactggatgggaattcgttttgaatataatccacccactgataagctagctatgattatgggttattgttgtttagaagtggtgcgtaaagagctagaagaaggtgaccttcccgagaatgatgatgatgcttggtttaagctatcgtaccattatgaaaacaattcttggttctttcgacatgtctacaggaaaagttcttatttccgtaagtcttgtcaaaatttagattgtaattgtttggggttttatgaatcttcagttgaagaagactaaactcagtgaaaatgtttttgcttcctagatttgttctagttagctgcataattggtagcctaggttttgacaaccctcctaccaatgttgtttcgcatttaaatggagattggtttttatttggtgacagtcgttcagattgtaatcatgttgttactaccaacccccgtaattattcttatatggaccttaatcctgccttgtgtggttctggtaaaatatcatctaaagctggcaactccatttttaggagttttcactttaccgatttttataattacacaggcgaaggtcaacaaattattttctatgagggtgttaattttacgccttatcatgcctttaaatgcaccacttctggtagtaatgatatttggatgcagaataaaggcttgttttacactcaggtttataagaatatggctgtgtatcgcagccttacttttgttaatgtaccatatgtttataatggctctgcacaatctacagccctttgtaaatctggtagtttagttcttaataaccctgcatatatagctcgtgaagctaattttggggattattattataaggttgaagctgatttttatttgtcaggttgtgacgagtatatcgtaccactttgtattttcaacggcaagtttttgtcgaatacaaagtattatgatgatagtcaatattattttaataaagacactggtgttatttatggtctcaattctactgaaaccattaccactggttttgactttaattgtcattatttagttctaccctctggtaattatttagccatttcaaatgagctattgttaactgttcctactaaagcaatctgtcttaataagcgtaaggattttacgcctgtacaggttgttgattcgcggtggaacaatgccaggcagtctgataacatgacggcagttgcttgtcaacccccgtactgttattttcgtaattctactaccaattatgttggtgtttatgatatcaatcatggggatgctggttttactagcatactcagtggtttgttatatgactcaccttgtttttcgcagcaaggtgtttttaggtatgataatgttagcagtgtctggcctctctacccctatggcagatgccctactgctgctgatattaatacccctgatgtacctatttgtgtgtatgatccgctaccaattattttgcttggcattcttttgggtgttgcggtcataattattgtagttttgttgttatattttatggtggataatggtactaggctgcatgatgcttagaccataatctaaacatgtttttgatacttttaatttccttaccaacggcttttgctgttataggagatttaaagtgtactacagtttccattaatgatgttgacactggtgttccttctattagcactgatactgtcgatgttactaatggtttaggtacttattatgttttagatcgtgtgtatttaaatactacgttgttgcttaatggttactaccctacttcaggttctacatatcgtaatatggcactgaagggaactttactattgagcacactgtggtttaaaccaccttttctttctgattttactaatggtatttttgctaaggtcaaaaataccaaggttattaaagatggtgtaatgtatagtgagtttcctgctataactataggtagtacttttgtaaatacatcttatagtgtggtagtacaaccacatactaccattttgggtaataaattacaaggtttcttagagatctctgtttgccagtatactatgtgcgagtacccaaatacgatttgtaatcctaatctgggtaatcaacgcgtagaactatggcattgggatacaggtgttgtttcctgtttatataagcgtaatttcacatacgatgtgaatgctgattatttgtatttccatttttatcaagaaggtggtactttttatgcatattttacagacactggtgttgttactaagtttctgtttaatgtttatttaggcacggtgctctcacattattatgtcatgcctttgacttgtaatagtgctctgactttagaatattgggttacacccctcacttctaaacaatatctactagctttcaatcaagatggtgttatttttaatgctgttgattgtaagagtgattttatgagtgagattaagtgtaaaacactatctatagcaccatctactggtgtttatgaattaaacggttacactgttcagccaattgcagatgtttaccgacgtatacctaatcttcccgattgcaatattgaggcttggcttaatgataagtcggtgccctctccattaaattgggaacgtaagaccttttcaaattgtaattttaatatgagcagcctgatgtcttttattcaggcatactcatttacttgtaataatattgatgctgctaagatatatggtatgtgtttttccagcataactatagataagtttgcaatacccaatggtaggaaggttgacctacaattgggtaatttgggctatttgcagtcttttaattatagaattgatactactgctacaagttgtcagttgtattataatttacctgctgctaatgtttctgttagcaggtttaatccttctacttggaataggagatttggttttacagaacaatctgtttttaagcctcaacctgcaggtgtttttactgatcatgatgttgtttatgcacaacattgttttaaagcttccacaaatttctgtccgtgtaaattggatgggtctttgtgtgtaggtaatggtcctggtatagatgctggttataaaactagtggcataggcacttgtcctgcaggtactaattatttaacttgccataatgctgcccaatgtgattgtttgtgcaccccagaccccattacatctaaagctacagggccttacaagtgcccccaaactaaatatttagttggcataggtgagcactgttcgggtcttgctattaaaagtgatcattgtggaggtaatccttgtacttgccaaccacaagcatttttgggttggtctgttgactcttgtttacaaggggataggtgtaatatttttgctaattttattttgcatgatgttaatagtggtactacttgttctactgatttacaaaaatcaaacacagacataattcttggtgtttgtgttaattatgatctttatggtattactggccaaggtatttttgttgaggttaatgcgacttattataatagttggcagaaccttttatatgattctaatggtaatctctatggttttagagactacttaacaaatagaacttttatgattcgtagttgctatagtggtcgtgtttcagcggcctttcatgctaactcttccgaaccagcattgctatttcggaatatcaaatgcaattacgtttttaataacactctttcacgacagctgcaacctattaactattttgatagctatcttggttgtgttgtcaatgctgataatagtacttctagtgttgttcaaacatgtgatctcacagtaggtagtggttactgtgtggattactctacaaaaagacgaagtcgtagatcgattaccactggttatcggtttactaattttgagccatttactgttaattcagtaaatgatagtttagaacctgtaggtggtttgtatgaaattcaaataccttcagagtttactataggtaatatggaggagtttattcaaacaagctctcctaaagttactattgattgttctgcttttgtctgtggtgattatgcagcatgtaaatcacagttggttgaatatggtagcttctgtgacaatattaatgctatactcacagaagtaaatgaactacttgacactacacagttgcaagtagctaatagtttaatgaatggtgtcactcttagcactaagcttaaagatggcgttaatttcaatgtagacgacatcaatttttcccctgtattaggttgtttaggaagcgattgcaataaagtttccagtagatctgctatagaggacttacttttttctaaagtaaagttatctgatgtcggtttcgttgaggcttataataattgtactggaggtgccgaaattagggacctcatttgtgtgcaaagttataatggtatcaaggtgttgcctccactgctctcggaaaatcagatcagtggatacactttggctgccacttctgctagcctgtttcctccatggtcagcagcagcaggtgtaccattctatttaaacgttcagtatcgtattaatggtattggtgttaccatggatgtgttaagtcaaaatcaaaagcttattgctaatgcatttaacaatgctcttggtgctattcaggaagggtttgatgctaccaattctgctttagttaaaattcaagctgttgttaatgcaaatgctgaagctcttaataacttattgcaacaactctctaatagatttggtgctataagttcttctttacaagaaattctatctagactggatgctcttgaagcgcaagctcagatagacagacttattaatgggcgtcttaccgctcttaatgcttatgtttctcaacagcttagtgactctacactagtaaagtttagtgcagcacaagctatggagaaggttaatgaatgtgtcaaaagccaatcatctaggataaatttttgtggtaatggtaatcatattatatcattagtgcagaatgctccatatggtttgtattttatccactttagctatgtccctactaagtatgtcactgcgaaggttagtcccggcctgtgcattgctggtgatagaggtatagcccctaagagtggttattttgttaatgtaaataatacttggatgttcactggtagtggttattactaccctgaacctataactggaaataatgttgttgttatgagtacctgtgctgttaattatactaaagcgccggatgtaatgctgaacatttcaacacccaacctcccttattttaaggaagagttggatcaatggtttaaaaaccaaacatcagtggcaccagatttgtcacttgattatataaatgttacattcttggacctacaagatgaaatgaataggttacaggaggcaataaaagttttaaatcagagctacatcaatctcaaggacattggtacatatgagtattatgtaaaatggccttggtatgtatggcttttaattggctttgctggtgtagctatgcttgttttactattcttcatatgctgttgtacaggatgtgggactagttgttttaagaaatgtggtggttgttgtgatgattatactggacaccaggagttagtaattaaaacatcacatgaagactaagttcgtctttgatttattgactcctgacgatatattacatccctccaatcatgtgaatctaattataagacccatttaggtcgagcatattataatagctaccacaatgcctgctgtttagtgggtactgtgtcttatataactagtaaacctgcaatgccaatggctacaaccattgaaggtgcagattatactaacattatgcctattactgttcttacaacagtttatttaggcgtttctataggtattgacactagcaccactggttttacctgtttttcatggtactagttccaaaccatattataatttaggtagaccttataactttaagcattattgccaaagtttttaaggccacgccctagtaatggacatctggaaacctgagattaaatatctccgttatactaacggttttaatgtctcagaattagaagatgcttgttttaaatttaactataaatttcctaaagtaggatattgtagagttcctagtcatgcttggtgccgtaatcaaggtagcttttgtgctacactcactctttatggcaaatccaaacattatgataaatattttggagtaataactggttttacagcattcgctaatactgtagaggaggctgtcaacaaactggttttcttagctgttgactttattacctggcgtagacaggagttaaatgtttatggctgatgcttattttgcagacactgtgtggtatgtggggcaaataatttttatagttgccatttgtttattggttataatagttgtagtggcatttttggcaacttttaaattgtgtattcaactttgcggtatgtgtaataccttagtactgtccccttctatttatgtgtttaatagaggtaggcagttttatgagttttacaatgatgtaaaaccaccagttcttgatgtggatgacgtttagttaatccaaacattatgagtagtgtaactacaccagcaccagtttacacctggactgctgatgaagctattaaattcctaaaggaatggaacttttctttgggtattatactactttttattacagtcatattgcaatttggatatacaagtcgcagtatgtttgtttatgttattaagatggtcattttgtggcttatgtggccccttactatcatcttaactattttcaattgcgtgtatgcgttgaataatgtgtatcttggcttctctatagtttttactatagtggccattattatgtggattgtgtattttgtgaatagtatcaggttgtttattagaactggaagttggtggagtttcaacccagaaacaaacaacttgatgtgtatagatatgaagggaaggatgtatgttaggccgataattgaggactaccatacccttacggtcacaataatacgtggtcatctttacatgcaaggtataaaactaggtactggctattctttgtcagatttgccagcttatgtgactgttgctaaggtctcgcacctgctcacgtataagcgtggttttcttgacaagataggcgatactagtggttttgctgtttatgttaagtccaaagtcggtaattaccgactgccatcaacccaaaagggttctggcttggacaccgcattgttgagaaataatatctaaactttaaggatgtcttttactcctggtaagcaatccagtagtagagcgtcctctggaaatcgttctggtaatggcatccttaagtgggccgatcagtccgaccaatctagaaatgttcaaaccaggggtagaagagctcaacccaagcaaactgctacttctcagcaaccatcaggagggaatgttgtaccctactattcttggttctctggaattactcagtttcaaaagggaaaggagtttgaatttgcagagggacaaggtgtgcctattgcaccaggagtcccagctactgaagctaaggggtactggtacagacacaaccgacgttcctttaaaacagccgatggcaaccagcgtcaattgctaccacgatggtatttttactatcttggaacaggaccgcatgccaaagaccagtatggcaccgacattgacggagtctactgggtcgctagtaaccaggctgatgtcaataccccggctgacattctcgatcgggacccaagtagcgatgaggctattccgactaggtttccgcctggcacggtactccctcagggttactatattgaaggctcaggaaggtctgctcctaattccagatctacttcacgcgcatccagtagagcctctagtgcaggatcgcgcagtagagccaattctggcaatagaacccctacctctggtgtaacacctgatatggctgatcaaattgctagtcttgttctggctaaacttggcaaggatgccgctaagccacagcaagtaactaagcagactgccaaagaaatcagacagaaaattttgaataaaccccgccagaagaggagccccaataaacaatgcactgttcagcagtgttttgggaagagaggccccaatcagaattttggtggtggagaaatgttaaaacttggaactagtgatccacagttccccattcttgcagaactcgcacccacagctggtgcgtttttctttggatcaagattagagttggccaaagtgcagaatttgtctgggaatcttgacgagccccagaaggatgtttatgaattgcgctataatggcgcaattagatttgatagtacactttcaggttttgagaccataatgaaggtgttgaatgagaatttgaatgcataccaacaacaggatggtacgatgaatatgagtccaaaaccacagcgtcagcgtggtcagaagaacggacaaggagaaaatgataatataagtgttgcagcgcccaaaagccgtgtgcagcaaaataagattagagagttgactgcagaggacatcagccttcttaagaagatggatgagccctttactgaagacacctcagaaatataagagaatgaaccttatgtcggcacctggtggtaacccctcgcaggaaagtcgggataaggcactctctatcagaatggatgtcttgctgctataatagatagagaaggttatagcagactatagattaattagttgaaagttttgtgtggtaatgtatagtgttggagaaagtgaaagacttgcggaagtaattgccgacaagtgcccaaggggaagagccagcatgttaagttaccatccagtaattagtaaatgaatgaagttaattatggccaattggaagaatcac

SEQ ID NO: 22 - DNA, 31028 bp, Coronavirus
gattgcgagcgatttgcgtgcgtgcatcccgcttcactgatctcttgttagatcttttcataatctaaactttataaaaacatccactccctgtagtctatgcctgtgggcgtagatttttcatagtggtgtctatattcatttctgctgttaacagctttcagccagggacgtgttgtatcctaggcagtggcccacccataggtcacaatgtcgaagatcaacaaatacggtctcgaactacactgggctccagaatttccatggatgtttgaggacgcagaggagaagttggacaaccctagtagttcagaggtggatatagtatgctccaccactgcgcaaaagctggaaacaggcggaatttgtcctgaaaatcatgtgatggtggattgtcgccgacttcttaaacaagaatgttgtgtgcagtctagcctaatacgtgaaattgttatgaatacacgtccatatgatttggaggtgctacttcaagatgctttgcagtcccgcgaagcagttttggttacaccccctctaggtatgtctctggaggcatgctatgtgagaggttgtaatcctaatggatggaccatgggtttgtttcggcgtagaagtgtgtgtaacactggtcgctgcgctgttaacaagcatgtggcctatcagctatatatgattgatcctgcgggtgtctgttttggtgcaggtcaatttgtgggttgggttatacccttagcctttatgcctgtgcaatcccggaaatttattgttccttgggttatgtacttgcgtaagtgtggcgaaaagggtgcctacaacaaagatcataaacgtggcggttttgaacacgtttataattttaaagttgaggatgcttacgacttggttcatgatgagcctaagggtaagttttctaagaaggcttatgctttaattagaggataccgtggtgttaaaccgcttctttatgtagaccagtatggttgtgattatactggtggtcttgcagatggcttagaggcttatgctgataagacattgcaagaaatgaaggcattatttcctatttggagccaggaactcccttttgatgtaactgtggcatggcacgttgtgcgtgatccacgttatgttatgagactgcagagtgcttctactatacgtagtgttgcatatgttgctaaccctactgaagacttgtgtgatggttctgttgtcataaaggaacctgtgcatgtttatgcggatgactctattattttacgtcaacataatttagttgacattatgagttgtttttatatggaggcagatgcagttgtaaatgctttttatggtgttgatttgaaagattgtggttttgttatgcagtttggttatattgactgcgaacaagacttgtgtgattttaaaggttgggttcctggtaatatgatagatggttttgcttgcactacttgtggtcatgtctatgagacaggtgatttgctagcacaatcttcaggtgttctgcctgttaatcctgtattgcatactaagagtgcagcaggttatggtggttttggttgtaaggattcttttaccctgtatggccaaactgtagtttattttggaggttgtgtgtattggagtccagcacgtaatatatggattcctatattaaaatcttctgttaagtcttatgacggtttggtttatactggagttgtaggttgcaaggctattgtaaaggaaacaaatctcatttgcaaagcgttgtaccttgattatgttcaacacaagtgtggcaatttacaccagcgggagttgctaggtgtgtcagatgtgtggcataaacaattgttattaaatagaggtgtgtacaaacctcttttagagaatattgattattttaatatgcggcgcgctaaatttagtttagaaacttttactgtttgtgcagatggttttatgccttttcttttagatgatttggttccgcgcgcatattatttggcagtaagtggtcaagcattttgtgactacgcagataaaatctgccatgctgttgtgtctaagagtaaagagttacttgatgtgtctctggattctttaagtgcagctatacattatttgaattctaaaattgttgatttggctcaacattttagtgattttggaacaagttttgtttctaaaattgttcatttctttaagacttttactactagcactgctcttgcatttgcatgggttttatttcatgttttgcatggtgcttatatagtagtagagagtgatatatattttgttaaaaacattcctcgttatgctagtgctgttgcacaagcatttcggagtgttgctaaagttgtactggactctttaagagttacttttattgatggcctttcttgttttaagattggacgtagaagaatttgtctctcaggcagtaaaatttatgaagttgagcgtggcttgttacattcatctcaattgccattagatgtttatgatttaaccatgcctagtcaagttcagaaagccaagcaaaaacctatttatttaaaaggttctggttctgatttttcattagcagatagtgtggttgaagttgttacaacttcacttacaccatgtggttattctgaaccacctaaagttgcagataaaatttgcattgtggataatgtttatatggccaaggctggtgacaaatattaccctgttgtggttgatggtcatgtaggactcttggatcaagcatggagggttccttgtgctggaaggcgtgttacatttaaggaacagcctacagtaaatgagattgcaagcacacctaagactattaaagttttttatgagcttgacaaagattttaatactattttaaacactgcatgtggagtgtttgaagtagatgataccgtggatatggaggaattttatgctgtggtggttgatgccatagaagagaaactttctccatgtaaggagcttgaaggtgtaggtgctaaagttagtgcctttttacagaaattagaggataattccctatttttatttgatgaggctggcgaggaagttcttgcttctaaattgtattgtgcttttacagctcctgaagatgatgactttcttgaagaaagtggtgttgaagaagatgatgtagaaggtgaggaaactgatttaactgtcacaagtgctggagagccttgtgttgccagtgaacaggaggagtcttctgaaatcttagaggacactttggatgatggtccatgtgtggagacatctgattcacaagttgaagaagatgtagaaatgtcggattttgctgatcttgaatctgtgattcaggattatgaaaatgtttgttttgagttttatactacagagccagaatttgttaaagttttggatctgtatgtgcctaaagcaactcgcaacaattgctggttgcgatcagttttggcagtgatgcagaaactgccctgtcaatttaaagataaaaatttgcaggatctttgggtgttatataagcaacagtatagtcagttgtttgttgataccttggttaataagatacctgctaatattgtagttccacaaggtggttatgttgccgattttgcatattggttcttaaccttatgtgattggcagtgtgttgcatactggaaatgcattaaatgtgatttagctcttaagcttaaaggcttggatgctatgttcttttatggtgatgttgtctcacatgtgtgcaagtgtggtgagtctatggtacttattgatgttgatgtgccatttacagcccactttgctcttaaagataagttgttttgtgcatttattactaagcgtagtgtgtataaagcagcttgtgttgtggatgttaatgatagtcattctatggctgttgttgatggtaaacaaattgatgatcatcgtgtcactagtattactagtgataagtttgattttattattgggcatggtatgtcattttcaatgactactttcgaaattgcccaattgtatggttcttgtataacacctaatgtatgttttgttaaaggtgatataattaaagtttctaagcgtgttaaagcagaagtcgttgtaaatcctgctaatggccatatggcacatggtggtggtgttgcaaaggctattgcagtagcagctggacagcagtttgttaaagagactaccgatatggttaagtctaaaggagtttgtgctactggagactgttatgtctctacagggggtaaattatgtaaaactgtgcttaatgttgttggacctgatgcgagaacacagggtaaacaaagttatgcattgttagagcgtgtttataaacatcttaacaaatatgattgtgttgttacaactttgatatcagctggtatatttagtgtgccttctgatgtgtctttaacatatctacttggtactgccgagaaacaagttgttcttgttagcaataatcaagaggattttgatcttatttctaagtgtcagataactgccgttgagggcactaagaaattggcagagcgtctttcttttaatgtagggcgttctatcgtttacgaaacagatgctaataagttgattttaagcaatgacgttgcatttgtttcgacatttaatgtcttacaggatgttttatccttaagacatgatatagcacttgatgatgatgcacgaacctttgttcagagcaatgttgatgttgtacctgagggttggcgtgttgtcaataagttttaccaaattaatggtgttagaaccgttaagtattttgagtgtcccggtggcatagatatatgcagccaggataaagtttttggttatgtacagcagggtagttttaataaggctactgttgctcaaattaaagccttgtttttggataaagtggacatcttgctaactgttgatggtgtcaatttcactaacaggtttgtgcctgtaggtgaaaattttggtaagagtctaggaaatgtgttctgtgatggagttaatgtcacgaaacataagtgtgatataaattataaaggtaaagtctttttccagtttgataatctttctagtgaagatttaaaggctgtaagaagttcttttaattttgatcagaaggaattgcttgcctactacaacatgcttgttaattgttctaaatggcaggttgtttttaatggtaagtatttcacttttaagcaagctaataacaattgttttgttaatgtttcttgcttaatgctccagagtttgaatctgaaatttaaaattgttcaatggcaggaggcgtggcttgaatttcgttctggtcgccctgctagatttgtatctttggttttggccaaaggtgggtttaaatttggtgatcctgctgattctagagatttcttgcgtgttgtgtttagtcaagttgatttgacaggggcaatatgtgattttgaaattgcatgtaaatgtggtgtaaagcaggaacagcgtactggtgttgacgctgttatgcattttggtacattgagtcgtgaagatcttgagattggttacaccgtggattgttcttgtggtaaaaagctaatccattgtgtacgatttgatgtaccatttttaatttgtagtaatacacctgctagtgtaaaattacctaagggtgtaggaagtgcaaatatttttaaaggtgataaggttggtcattatgttcatgttaagtgtgaacagtcttatcagctttatgatgcttctaatgttaagaaggttacagacgttactggcaatttgtcagattgtttgtatcttaaaaatttgaaacaaacttttaaatcggtgttaaccacctattatttggatgatgttaagaaaattgagtataaacctgacttgtcacaatattattgtgacggaggtaagtattatactcagcgtattattaaagcccaatttaaaacatttgagaaagtagatggtgtgtatactaattttaaattgataggacacaccatctgtgatattcttaatgctaagttgggttttgatagctctaaagagtttgttgaatataaagttactgagtggccaacagctacaggtgatgtggtgttggctactgatgatttgtatgttaagagatatgaaaggggttgtattacttttggtaaacctgttatatggttaagccatgagcaagcttccctcaattctttaacatattttaatagacctttattggttgatgagaataaatttgatgttttaaaagtggatgatgttgacgatggtggtgatatctcagagagtgatgccaaagaatccaaagaaatcaacattattaagttaagtggtgttaaaaaaccatttaaggttgaagatagtgtcattgttaatgatgatactagtgaaatcaaatatgttaagagtttgtctatagttgatgtgtatgatatgtggcttacaggttgtaggtatgttgttagaactgctaatgatttgagcatggcagttaacgtacctacaatacgtaagtttataaaatttggtatgactcttgttagtataccaattgatttgttaaatttaagagagattaagcctgtttttaatgtggttaaagctgtgcgaaataaaatttctgcatgctttaattttattaaatggctttttgtcttattatttggctggatcaaaatatccgctgataataaagtaatttacaccacagaagttgcatcaaagcttacatgtaagcttgtagctttagcttttaaaaatgcgtttttgacatttaagtggagtgtggttgctagaggtgcttgcattatagcgactatatttctattgtggtttaattttatatatgccaatgtaatttttagtgatttttatttgcctaaaattggtttcttgccgacttttgttggtaagatcgcacagtggattaagagcacttttagtcttgtaactatttgtgatctatattccattcaggatgtgggttttaagaatcagtattgtaatggaagtatcgcatgtcaattctgcttggcaggatttgatatgttagataattataaagccattgatgtagtacagtatgaagctgataggagagcatttgttgattatacaggtgtgttaaagattgtcattgaattgatagttagttacgccctgtatacggcatggttttacccattgtttgctcttattagtattcagatcttgaccacttggctgcctgagctttttatgcttagtacattacattggagtgttaggttgctggtgtctttagctaatatgttaccagcacatgtgtttatgaggttttatattattattgcctcttttattaagctgtttagcttgtttaggcatgttgcctatggttgtagtaaacctggttgtttgttttgttacaagaggaatcgtagtctacgtgttaaatgtagtactattgttggtggcatgatacgctattacgatgttatggctaatggtggcactggcttttgttcaaaacatcaatggaattgcattgattgtgattcttataaaccaggtaatacttttattactgttgaggccgctcttgatttatctaaggaattgaaacggcctattcagcctacagatgttgcttatcatacggttacggatgttaagcaagttggttgttatatgcgcttgttctatgagcgtgatggacagcgcacatatgatgatgttaatgctagtttgtttgtggattatagtaatttgctacattctaaggttaagggtgtgcctaatatgcatgttgtggtagtggaaaatgatgccgataaagctaattttcttaatgctgctgtattttatgcacagtctttgtttagacctattttaatggttgataaaaatctgataactactgctaatactggtacgtctgttacagaaactatgtttgatgtttatgtggacacatttttgtctatgtttgatgtggataaaaagagtcttaatgctttaatagcaactgcgcattcttctataaaacagggtacgcagatttgtaaagttttggatacctttttaagctgtgctcgtaaaagttgttctattgattcagatgttgatactaagtgtttagctgattctgtcatgtctgctgtatcggcaggccttgaattgacggatgaaagttgtaataacttggtgccaacatatttgaagggtgataacattgtggcagctgatttaggtgttctgattcaaaattctgctaagcatgtgcagggtaatgttgctaaaatagccggtgtttcctgtatatggtctgtggatgcttttaatcagctaagttctgatttccagcataaattgaagaaagcatgttgtaaaactggtttgaaattgaagcttacttataataagcagatggctaatgtctctgttttaactacaccctttagtcttaaagggggtgcagtttttagttattttgtttatgtatgttttctgttgagtttggtttgttttattggattgtggtgcttaatgcccacttacacagtacacaaatcagattttcagcttcccgtttataccagttataaagttttagataatggtgttattagagatgttagcgttgaagatgtttgtttcgctaacaaatttgaacaatttgatcaatggtatgagtctacatttggtctaagttattatagtaacagtatggcttgtcccattgttgttgctgtagtagaccaggatcttggctctactgtgtttaatgtccctaccaaagtgttacgatatggttaccatgtgttgcactttattacacatgcactttctgctgatggagtgcagtgttatacgccacatagtcaaatatcgtattctaatttttatgctagtggctgtgtgctttcctccgcttgtactatgtttgcaatggccgatggtagtccacaaccttattgttatacagaggggcttatgcagaatgcttctctgtatagttcattggtacctcacgtgcggtataatcttgctaatgctaaaggttttatccgttttccagaagtgttgcgagaaggacttgtgcgtattgtgcgtactcgttctatgtcgtattgcagagttggattatgtgaggaagctgatgagggtatatgctttaactttaatggttcttgggtgcttaataatgattattatagatcattgcctgggaccttttgtggtagagatgtttttgacttaatttatcagctttttaaaggtttagcacagcctgtggatttcttggcattgactgctagttctattgctggtgctatacttgctgtaattgttgttttggtgttttattacttaataaagcttaaacgtgcttttggtgattacaccagtattgtttttgtcaatgtgattgtgtggtgtgtaaattttatgatgctttttgtgtttcaagtttaccctacactttcttgtgtatatgctatttgttatttttatgccacgctttatttcccttcggagataagtgtgataatgcatttacaatggctagttatgtatggcactattatgcctttatggttttgtttgctatatatatctgttgttgtttcaaatcatgctttttgggtattcgcttactgcagacggcttggtacttctgttcgtagtgatggtacatttgaagaaatggctcttactacttttatgattacaaaagattcttattgtaagcttaagaattctttgtctgatgttgcttttaatagatatttgagtttgtataataaatataggtattacagcggtaaaatggatactgctgcatatagggaggctgcttgttctcagttggctaaagcaatggatacatttaccaataataatggtagtgatgtgctttaccaaccacctactgcttccgtttcaacttcattcttgcaatctggtattgtgaaaatggttaatcctacttctaaggtagaaccatgtattgtcagtgttacctatggtaatatgacattgaatggtttatggttggatgataaggtctactgtcccagacatgtgatatgttctgcttcagatatgactaatccagattatacaaatttgttgtgtagagtaacatcaagtgattttactgtattgtttgatcgtttaagccttacagtgatgtcttatcaaatgcagggttgtatgcttgttcttacagtgaccctgcaaaattctcgtacgccaaaatatacatttggtgtggttaaacctggtgagacttttactgttttagctgcttataacggcaaaccacaaggagcctttcatgtgactatgcgtagtagttataccattaagggttcctttttgtgcgggtcttgtggatctgttggttatgtgctaatgggtgattgtgttaaatttgtgtatatgcatcaattggagcttagtactggttgtcatactggtactgatttcaatggggatttttatggtccttataaggatgctcaggttgtccaattgcccgttcaggattatatacaatctgttaattttgtagcatggctttatgctgctatacttaataattgtaattggtttgtacaaagtgataagtgttctgttgaagattttaatgtgtgggctttgtctaatgggtttagccaagttaagtctgatcttgttatagatgctttagcttctatgactggtgtgtctttggaaacactattggctgctattaagcgtctcaagaatggttttcaaggacgtcagattatgggtagttgctcctttgaggatgaattgacacctagcgatgtttatcaacaactcgctggtatcaagttacaatcaaagcgtactagattggttaaaggcattgtttgttggattatggcttctacatttttgtttagttgtataattacagcatttgtgaaatggactatgtttatgtatgtaactactaatatgcttagtattacgttttgtgcactttgtgttataagtttggccatgttgttggttaaacataagcatctttatttgactatgtatataattcctgtgctttttacactgctgtataacaactatttggttgtgtacaagcagacatttagaggctatgtttatgcatggctatcatattatgttccatcagttgagtatacttatactgatgaagttatttatggcatgttattgcttataggaatggtctttgttacattacgtagcattaaccatgatttgttctcttttataatgtttgttggccgtgtgatttctgttgtctctttgtggtacatgggttctaacttagaggaagaaattcttcttatgttggcttctctttttggtacttacacatggacaacagctttatctatggctgcagcaaaggttattgctaagtgggttgctgtgaatgttttgtatttcacagatatacctcaaattaagatagtgcttgtatgctatttgtttataggttatattattagctgttattggggtttgttttccttgatgaacagtttgtttagaatgcctttgggtgtttataattataaaatttcagtacaggaattaagatatatgaatgctaatggattgcgccctcctaagaatagttttgaagcccttatgcttaattttaagcttttgggtattggaggtgtgccaattattgaagtatctcaatttcaatcaaaattgactgatgttaaatgtgctaatgttgtcttgcttaattgcttgcaacatttgcatgttgcttctaactctaagttgtggcagtattgtagcactttgcacaatgaaatacttgccacttctgatctgggtgttgcttttgaaaagcttgctcagttgttaattgttttgtttgctaatccagctgctgtggatagcaagtgcctgactagtattgaagaagtttgcgacgattacgcaaaggacaatactgttttgcaggctttacagagtgaatttgttaatatggctagcttcgttgaatatgaagttgctaagaaaaatcttgatgaggcgcgttctagtggttctgctaatcaacagcagttaaaacagctagagaaagcctgtaatattgctaaatctgcttatgaacgcgaccgtgctgtagcaagaaagttggagcgtatggcagatttggctctcactaatatgtataaagaagctagaattaatgataagaagagtaaggttgtttctgccttgcaaactatgctttttagtatggtgcgtaagttagataatcaagctctgaattcaatattagataatgctgtgaagggttgtgtaccattgaatgcaatcccttcattggctgcaaatactctgactataattgtaccagataaaagtgtttacgatcaggtagttgacaatgtctatgttacctatgcgggtaatgtatggcagattcaaactatccaagattcagatggtacaaataagcagttgaatgagatatctgatgattgtaactggccactagttattattgcaaatcggcataatgaggtatctgcaaccgttttgcaaaataatgaattaatgcctgctaagttgaaaactcaggtcgttaatagtggtccagatcagacttgtaacacacctactcaatgttactataataatagtaacaatgggaagattgtttatgctatacttagtgatgttgatggtcttaagtatacaaagattcttaaagatgatggcaattttgttgttttggagttagatcctccttgtaaatttactgttcaagatgttaaaggtcttaaaattaagtacctttattttgtaaaaggttgtaacacactagcaagaggctgggttgttggtacaatttcttctacagttagattgcaagctggaactgctactgagtatgcttccaactcatctatattatctttatgtgcgttttctgtagatcctaagaaaacgtatttagattttatacagcagggaggaacacctattgccaattgtgttaaaatgttgtgtgaccatgctggtaccggtatggccattactgttaaacccgatgctaccactaatcaggattcatatggtggtgcgtctgtttgtatatattgccgcgcacgagttgaacacccagatgttgatgggttgtgcaaattacgcggcaagtttgtacaagtgcctgtaggtataaaagatcctgtgtcttatgttttgacacatgatgtttgtcaagtttgtggattttggcgggatggaagttgttcatgtgttagcactgacactactgttcagtcaaaagatactaattttttaaacgggttcggggtacgagtgtagatgcccgtctcgtaccctgtgccagtggtttatctactgatgtacaattaagggcatttgatatttgcaatgctagtgttgctggcattggtttacatttaaaagttaattgctgccgttttcagcgtgttgatgagaacggtgataaattagatcagttctttgttgttaagaggacagatctgactatatataatagagagatggaatgctatgagcgtgtaaaagattgtaagtttgtggctgaacacgatttctttacatttgatgtagaaggtagtcgtgtgccacatattgtacgcaaggatttaacaaagtatactatgttggatctttgctatgcgttgcgacattttgatcgcaatgattgcatgctgctttgtgacattctctctatatatgctggttgtgaacaatcctactttactaagaaggattggtatgattttgttgaaaatcctgatattattaatgtttataaaaagctaggacctatttttaatagagccctagttagcgctactgagtttgcagacaaattggtggaggtaggcttagtaggcattttaacacttgataaccaagatttaaatggtaaatggtatgattttggtgactatgttattgcagccccaggttgtggtgttgctatagcagactcttattattcttatatgatgcctatgctgaccatgtgtcatgcattggattgtgaattgtatgtgaataatgcttatagactatttgatcttgtacagtatgattttactgattacaagctcgaattgtttaataagtattttaagcactggagtatgccataccatcctaacacggttgattgtcaggatgatcggtgtatcatacattgtgctaattttaacatactttttagtatggttttacctaatacatgttttgggcctcttgttaggcaaatttttgtggatggtgttccttttgttgtttcaattggataccattataaagaacttggtattgtgatgaatatggatgtggatacacatcgttatcgcttgtctttaaaagacttgcttttatatgctgctgatccagctttgcatgtagcttctgctagtgcattgtatgatttacgcacttgctgttttagtgttgcggctataacaagcggtgtgaaatttcaaacagttaaacctggtaattttaatcaggatttttatgattttattttaagtaagggcctgcttaaagagggtagttcagttgatctgaagcactttttctttacgcaggatggtaatgctgctattactgattataattattataagtataatttgcccaccatggtggacattaagcagttgttgtttgttttggaagttgtttataagtattttgagatttatgatggtgggtgtataccggcatcacaagtcattgttaataattatgataagagtgctggctatccatttaataaatttggaaaagccaggctctattatgaagcattatcatttgaggagcaggatgaaatttacgcctatactaagcgcaatgtcctgccaacacttactcaaatgaatttgaaatatgctattagtgctaagaatagagcccgcactgttgctggtgtttccatacttagtactatgactggcagaatgtttcatcaaaagtgtttgaaaagtatagcagctacacgtggtgttcctgttgttataggcaccactaaattttatggcggctgggatgatatgttacgtcgccttattaaagatgttgataatcctgtacttatgggttgggattatcctaagtgtgatcgtgctatgccaaacatactacgtattgttagtagtctggttttggctcgaaaacatgaggcatgttgttcgcaaagcgataggttttatcgacttgcgaatgaatgcgcacaagttctgagtgaaattgttatgtgtggtggctgttattatgttaagcctggtggcactagtagtggtgatgcaactactgcttttgctaattcagtttttaacatatgtcaagctgtttcagccaatgtatgtgctttaatgtcatgcaatggtaataagattgaagatttgagtatacgtgctcttcagaagcgcttatactcacatgtgtatagaagtgatatggttgattcaacctttgtcacagaatattatgaatttttaaataagcattttagtatgatgattttgagtgatgatggcgttgtgtgttataattctgattatgcgtccaaagggtatattgctaatataagtgcctttcaacaggtattgtattatcaaaataacgtttttatgtcagaatccaaatgttgggttgaaaatgacataaacaatggacctcatgaattctgttcacaacacacaatgcttgtaaagatggatggggacgatgtctatcttccatatcctgatcctagtcgtatattaggagctggatgttttgtagatgatttgttaaagactgatagtgttcttttaatagaacgatttgtaagtcttgcaatagatgcttatccacttgtgtaccacgaaaatgaagaataccaaaaggtttttcgtgtttatttggagtatataaagaagttgtacaatgacctgggtaatcagatcttggatagctacagtgttattttaagtacttgtgatggacaaaagtttactgatgagtccttttacaagaacatgtatttaagaagtgcagttatgcagagtgttggagcttgcgtggtctgctcttctcaaacatcattacgttgtggcagttgcatcagaaagcctcttctttgctgcaagtgttgttacgatcatgttatggcaactgatcataaatatgttttgagtgtttcaccatatgtgtgtaacgcaccaggatgtgatgtaaatgatgttaccaaattgtatctaggtggtatgtcatattattgtgaagatcataagccacaatattcgtttaagttggtaatgaatggtatggtttttggtctatataaacaatcttgtacaggatctccgtacatagatgattttaatcgtatagctagttgtaaatggactgatgttgatgattacatactggctaatgaatgtacagagcgcttgaaattgtttgctgcagaaacgcaaaaggcgactgaggaagcctttaagcagagttatgcatcagcaacaatacaagagattgttagcgagcgcgaattgatcctttcttgggagattggaaaagtgaagccaccacttaataaaaattatgtttttactggctaccattttactaaaaatggcaagacagttttaggtgagtatgtttttgataagagtgagttgactaatggtgtgtattatcgcgccacaaccacttataagctatctgtaggagatgtttttgttttaacctctcattcagtagctaatttaagtgctcctacgcttgtgccgcaggagaattatagtagtattagatttgctagtgtttatagtgtgcttgagacgtttcagaacaatgtcgttaattatcaacacattggtatgaaacgttattgtaccgtgcaaggacctcctggtacaggaaagtcacatcttgctattggtcttgctgtttattattgtacagcacgtgtagtatacactgcggccagccatgcagctgttgacgcattgtgtgaaaaagcatacaaatttttgaatataaatgactgcactcgtattgttcctgccaaggtcagggtggagtgctatgataagtttaaaattaatgacaccactcgtaagtatgtgtttactactataaatgcattacctgagatggtgactgatattgttgttgtagatgaagttagtatgcttaccaattatgagctttctgttattaatgctcgtattcgtgctaagcattatgtttacattggtgatcctgctcaattgccagcaccacgtgtgttattgagcaagggtacacttgaacctaaatattttaacactgttactaagcttatgtgttgcttagggccagacatttttcttggtacatgttatagatgtcctaaggaaattgttgatacagtgtctgccttggtttatgaaaataagcttaaggctaagaatgaaagtagttcattgtgttttaaggtctattataaaggcgttacaacacatgaaagttctagtgctgtaaatatgcagcagatttatttgattaataagtttttgaaggctaaccctttgtggcataaagccgtttttattagcccatataatagccagaactttgcagctaagcgtgttttgggtttgcaaacccagaccgtggattctgctcaaggttctgaatatgattatgttatatattcacagactgcagaaacagcgcattctgtaaatgttaatcgcttcaatgttgctattactcgagccaagaaaggtattctttgtgttatgagtaatatgcagttgtttgaagcattacagtttactacattgaccttagataaagtgccacaggccgttgaaacgagagttcaatgtagtaccaatttatttaaagattgtagcaagagttatagtggttaccacccagctcacgctccttcatttttggcagtagatgacaaatataaggcaactggcgatttagccgtgtgtcttggtattggagattctgctgttacatattcaagattaatatcactcatgggttttaaacttgatgtcacccttgatgggtattgtaagctttttataactaaagaagaagctgttaaacgcgtgcgtgcttgggttggctttgatgctgaaggcgctcatgccacgcgtgatagcattgggacaaatttcccacttcaattagggttttctacaggaattgattttgttgtggaagccactggtttgtttgctgatagagatggttacagctttaaaaaggctgtggctaaagctcctcctggtgaacaatttaagcatctcatccctttgatgactagaggtcagcgctgggatgttgttagacctagaatagtacaaatgtttgcagatcatttaattgatctgtctgattgtgttgtgctagttacatgggcagccaactttgagctcacttgtctccgatactttgcaaaagtaggtcgtgagatttcttgtaatgtgtgcactaaacgtgccacagcttacaattctagaactggttactatggttgttggcgccatagtgttacatgtgattacttgtataatccacttattgttgatattcaacagtggggatatattggatctttatcaagtaatcatgatttatattgtagtgtccacaaaggagcacatgttgcttcatctgatgctataatgacacggtgtttggccgtttatgattgtttttgcaataatattaattggaatgtggagtatcccattatttcaaatgagttaagtattaatacctcttgtagggtcttgcagcgtgttatgcttaaagctgcaatgctctgcaacagatatactttgtgttatgatattggcaacccaaaagcgattgcctgtgtcaaagattttgattttaagttctatgatgcccaaccaattgttaagtctgtcaagactcttttgtattcttttgaggcacataaggactcttttaaagatggtttgtgtatgttttggaactgtaatgtggataagtatccaccgaatgcagttgtatgtagatttgacacgagagtgttgaataatttaaatcttcctggctgtaatggaggtagtttgtatgttaataaacatgcattccacactaaacccttttctagggcagcctttgagcatttgaagcctatgccatttttctattattcagatacgccttgcgtgtatatggatggcatggatgctaagcaggttgattatgtacctttgaaatccgccacttgcatcacaagatgcaatttaggtggtgcagtttgtttaaaacatgctgaagagtatcgtgagtacctagagtcttacaatacagctactacagcaggttttactttttgggtctataagacatttgatttttataatttgtggaatacgttcaccaagctacaaagcttggagaacgttgtatataatttagtcaaaactggtcattatacaggacaggctggtgaaatgccttgtgccattataaatgataaagttgtggctaagatcgataaggaggatgttgtcatttttattaataatacaacataccctactaatgttgctgttgaattatttgccaagcgcagtattcgacaccatccagagcttaagctctttagaaatttgaatatagacgtgtgttggaagcacgtcatttgggattatgctagagaaagtatattttgcagtaatacctatggtgtctgcatgtatacagatttaaagttcattgataaattgaatgtcctttttgatggtcgtgataatggtgctcttgaagcttttaaacgctctaataatggcgtttacatttccacgacaaaagttaagagtctttcgatgataaaaggtccaccgcgtgctgaattaaatggcgtagtggtggacaaggttggagacactgattgtgtgttttattttgctgtgcgtaaagagggtcaggatgtcatcttcagccaattcgacagcctgagagtcagctctaaccagagcccacaaggtaatctggggagtaatgaacccggtaatgtcggtggtaatgatgctctggcaacctccactatctttacacaaagccgtgttattagctcttttacatgtcgtactgatatggaaaaagattttatagctttagatcaagacttgtttattcagaagtatggtttggaggactatgcctttgaacacattgtttatggtaatttcaaccagaagattattggtggtttgcatttgttaataggcttgtaccgaagacagcaaacttccaatctggttattcaggagtttgtttcatacgactccagcatacactcttattttatcactgatgagaagagtggtggtagtaagagtgtttgcactgttatagatattttgttggatgattttgtggctcttgttaagtcacttaatctcaactgtgtgagtaaggttgttaacgttaatgttgattttaaagattttcagttcatgctttggtgtaacgatgagaaagttatgactttctatcctcgtttgcaagctgcatctgactggaagcctggttattctatgcctgtattatacaagtatttgaattccccaatggaaagagttagtctctggaattatgggaagccggttactttgcctacaggctgtatgatgaatgttgctaagtatactcagttatgtcaatatctgaatactacaacattagctgtacctgttaatatgcgagttttgcatttaggtgcaggttcagaaaaaggagtagcaccgggttctgcagttcttaggcagtggttgcctgctggtactattcttgtagataatgatttatacccatttgtgagtgacagtgtcgctacatattttggggattgtataaccttaccctttgattgtcaatgggatttgataatttctgatatgtatgaccctattactaagaacataggggagtacaatgtaagtaaagatggtttctttacatacatttgtcatatgattcgcgacaagttagctctgggtggcagtgttgctataaaaataacagagttttcttggaatgcagaattatataagttaatggggtattttgcattttggacggttttctgcacaaatgcaaacgcttcttctagtgaagggtttttaattggcataaattatttgggtaagcccaaggttgagatagatggaaatgttatgcatgccaattatttgttttggagaaattccacagtttggaacgggggtgcttatagcctgtttgacatggctaaattcccgcttaagttggctggtactgccgtaataaatttaagagcagaccagattaatgatatggtttattcccttcttgaaaagggtaaactacttgttagagatacaaataaagaagtttttgttggtgacagtttggttaatgtaatctaaactttaagaatggcagtcgcttatgcagacaagcctaatcactttatcaattttccacttacccagtttcagggctttgtgttaaattataaaggtttacaatttcaacttctcgatgaaggagtggattgtaaaatacaaacagcgcctcacattagtcttgctatgctggatattcagcctgaagactacagaagtgttgatgttgctattcaagaagttattgatgatatgcattggggtgagggctttcagattaaatttgaaaacccccatatcctaggaagatgcatagttttagatgttaaaggtgtagaagaattgcatgatgatttagttaattacattcgtgataagggttgtgttgatgaccaatccaggaagtggattggacattgcaccatagcccaactcactgatgctgcactttccattaagggaaatgttgattttataaacagcatgcaattcaactataaaatcactatcaatccctcatcaccggctagacttgaaatagttaagcttggtgctgaaaagaaagatggtttttatgaaaccatagctagccactggatgggaattcgttttgaatataatccacccactgataagctagctatgattatgggttattgttgtttagaagtggtgcgtaaagagctagaagaaggtgaccttcccgagaatgatgatgatgcttggtttaagctatcgtaccattatgaaaacaattcttggttctttcgacatgtctacaggaaaagttcttatttccgtaagtcttgtcaaaatttagattgtaattgtttggggttttatgaatcttcagttgaagaagactaaactcagtgaaaatgtttttgcttcctagatttgttctagttagctgcataattggtagcctaggttttgacaaccctcctaccaatgttgtttcgcatttaaatggagattggtttttatttggtgacagtcgttcagattgtaatcatgttgttactaccaacccccgtaattattcttatatggaccttaatcctgccttgtgtggttctggtaaaatatcagctaaagctggcaactccatttttaggagttttcactttactgatttttataattacacaggcgaaggtcaacaaattattttctatgagggtgttaattttacgccttatcatgcctttaaatgcatcacttctggtagtaatgatatttggatgcagaataaaggcttgttttacactcaggtttataagaatatggctgtgtatcgcagccttacttttgttaatgtaccatatgtttataatggctctgcacaatctacagccctttgtaaatctggtagtttagttcttaataaccctgcatatatagctcgtgaagctaattttggggattattattataaggttgaagctgatttttatttgtcaggttgtgacgagtatatcgtaccactttgtattttcaacggcaagtttttgtcgaatacaaagtattatgatgatagtcaatattattttaataaagacactggtgttatttatggtctcaattctactgaaaccattaccactggttttgactttaattgtcattatttagttctaccctctggtaattatttagccatttcaaatgagctattgttaactgttcctactaaagcaatctgtcttaataagcgtaaggattttacgcctgtacaggttgttgattcgcggtggaacaatgccaggcagtctgataacatgacggcagttgcttgtcaacccccgtactgttattttcgtaattctactaccaattatgttggtgtttatgatatcaatcatggggatgctggttttactagcatactcagtggtttgttatatgactcaccttgtttttcgcagcaaggtgtttttaggtatgataatgttagcagtgtctggcctctctacccttatggcagatgccctactgctgctgatattaatacccctgatgtacctatttgtgtgtatgatccgctaccaattattttgcttggcattcttttgggtgttgcggtcataattattgtagttttgttgttatattttatggtggataatggtactaggctgcatgatgcttagaccataatctaaacatgtttttgatacttttaatttccttaccaacggcttttgctgttataggagatttaaagtgtactacagtttccattaatgatgttgacactggtgttccttctattagcactgatactgtcgatgttactaaaggtttaggtacttattatgttttagatcgtgtgtatttaaatactacgttgttgcttaatggttattaccctacttcaggttctacatatcgtaatatggcactgaagggaactttactattgagcacactgtggtttaaaccaccttttctttctgattttactaatggtatttttgctaaggtcaaaaataccaaggttattaaagatggtgtaatgtatagtgagtttcctgctataactataggtagtacttttgtaaatacatcctatagtgtggtagtacaaccacatactaccattttgggtaataaattacaaggtttcttagagatctctgtttgccagtatactatgtgcgagtacccaaatacgatttgtaatcctaatctgggtaatcgacgcgtagaactatggcattgggatacaggtgttgtttcctgtttatataagcgtaatttcacatatgatgtgaatgctgattatttgtatttccatttttatcaagaaggtggtactttttatgcatattttacagacactggtgtcgttactaagtttctgtttaatgtttatttaggcacggtgctctcacattattatgtcatgcctttgacttgtaatagtgctctgactttagaatattgggttacacccctcacttctaaacaatatctactagctttcaatcaagatggtgttatttttaatgctgttgattgtaagagtgattttatgagtgagattaagtgtaaaacactatctatagcaccatctactggtgtttatgaattaaacggttacactgttcagccaattgcagatgtttaccgacgtatacctaatcttcccgattgcaatattgaggcttggcttaatgataagtcggtgccctctccattaaattgggaacgtaagactttttcaaattgtaattttaatatgagcagcctgatgtcttttattcaggcagactcatttacttgtaataatattgatgctgctaagatatatggtatgtgtttttccagcataactatagataagtttgcaatacccaatggtaggaaggttgacctacaattgggtaatttgggttatttgcagtcttttaactatagaattgatactactgctacaagttgtcagttgtattataatttacctgctgctaatgtttctgttagcaggtttaatccttctacttggaataggagatttggttttacagaacaatctgtttttaagcctcaacctgcaggtgtttttactgatcatgatgttgtttatgcacaacattgttttaaagctcccacaaatttctgtccgtgtaaattggatgggtctttgtgtgtaggtaatggtcctggtatagatgctggttataaaactagtggcataggcacttgtcctgcaggtactaattatttaacttgccataatgctgcccaatgtgattgtttgtgcactccagaccccattacatctaaagctacagggccttacaagtgcccccaaactaaatatttagttggcataggtgagcactgttcgggtcttgctattaaaagtgatcattgtggaggtaacccttgtacttgccaaccacaagcatttttggggtggtctgttgactcttgtttacaaggggataggtgtaatatttttgctaatttcattttgcatgatgttaatagtggtactacttgttctactgatttacaaaaatcaaacacagacataattcttggtgtttgtgttaattatgatctttatggtattactggccaaggtatctttgttgaggttaatgcgacttattataatagttggcagaaccttttatatgattctaatggtaatctctatggttttagagactacttaacaaatagaacttttatgattcgtagttgctatagtggtcgtgtttcagcggcctttcatgctaactcttccgaaccagcattgctatttcggaatattaaatgcaattacgtttttaataatactctttcacgacagctgcaacctattaactattttgatagctatcttggttgtgttgtcaatgctgataatagtacttctagtgttgttcaaacatgtgatctcacagtaggtagtggttactgtgtggattactctacaaaaagacgaagtcgtagatcgattaccactggttatcggtttactaattttgagccatttactgttaattcagtaaatgatagcttagaacctgtaggtggtttgtacgaaattcaaataccttcagagtttactataggtaatatggaggagtttattcaaacaagctctcctaaagttactattgattgttctgcttttgtctgtggtgattatgcagcatgtaaatcacagttggttgaatatggtagcttctgtgacaatattaatgctatactcacagaagtaaatgaactacttgacactacacagttgcaagtagctaatagtttaatgaatggtgtcactcttagcactaagcttaaagatggcgttaatttcaatgtagacgacatcaatttttcccctgtattaggttgtttaggaagcgattgtaataaagtttccagtagatctgctatagaggacttacttttttctaaagtaaagttatctgatgtcggtttcgttgaggcttataataattgtactggaggtgccgaaattagggacctcatttgtgtgcaaagttataatggtatcaaggtgttgcctccactgctctcagaaaatcagatcagtggatacactttggctgccacctctgctagcctgtttcctccatggtcagcagcagcaggtgtaccattctatttaaatgttcagtatcgtattaatggtattggtgttaccatggatgtgctaagtcaaaatcaaaagcttattgctaatgcatttaacaatgctcttggtgctattcaggaagggtttgatgctaccaattctgctttagttaaaattcaagctgttgttaatgcaaatgctgaaactcttaataacttattgcaacaactctctaatagatttggtgctataagttcttctttacaagaaattctatctagactggatgctcttgaagcgcaagctcagatagacagacttattaatgggcgtcttaccgctcttaatgcttatgtttctcaacagcttagtgactctacactagtaaagtttagtgcagcacaagctatggagaaggttaatgaatgtgtcaaaagccaatcatctaggataaatttttgtggtaatggtaatcatattatatcattagtgcagaatgctccatatggtttgtattttatccactttagctatgtccctactaagtatgtcactgcgaaggttagtcccggtctgtgcattgctggtggtagaggtatagcccctaagagtggttattttgttaatgtaaataacacttggatgttcactggtagtggttattactaccctgaacctataactggaaataatgttgttgttatgagtacctgtgctgttaattatactaaagcgccggatgtaatgctgaacatttcaacacccaacctccctgattttaaggaagagttggatcaatggtttaaaaaccaaacttcagtggcaccagatttgtcacttgattatataaatgttacattcttggacctacaagatgaaatgaataggttacaggaggcaataaaagttttaaatcagagctacatcaatctcaaggacattggtacatatgagtattatgtaaaatggccttggtatgtatggcttttaattggctttgctggtgtagctatgcttgttttactattcttcatatgctgttgtacaggatgtgggactagttgttttaagaaatgtggtggttgttgtgatgattatactggacaccaggagttagtaattaaaacatcacatgaagattaagttcgtctttgatttattgactcctgacgatatattacatccctccaatcatgtgaatctaattataagacccatttaggtcgagcatattataatagctaccacaatgcctgctgtttagtgggtactgtgtcttatataactagtaaacctgcaatgccaatggctacaaccattgaaggtgcagattatactaacattatgcctattactgttcttacaacagtttatttaggcgtttctataggtattgacactagcaccactggttttacctgtttttcacgttactagttccaaaccatattataattcaggtagaccttataactttaagcattattgccaaagtttttaaggccacgccttagtaatggacatctggaaacctgagattaaatatctccgttatactaacggttttaatgtctcagaattagaagatgcttgttttaaatttaactataaatttcctaaagtaggatattgtagagttcctagtcatgcttggtgccgtaatcaaggtagcttttgtgctacactcactctttatggcaaatccaaacattatgataaatattttggagtaataactggttttacagcattcgctaatactgtagaggaggctgtcaacaaactggttttcttagctgttgactttattacctggcgtagacaggagttaaatgttcatggctgatgcttattttgcagacactgtgtggtatgtggggcaaataatttttatagttgccatttgtttattggttataatagttgtagtggcatttttggcaacttttaaattgtgtattcaactttgcggtatgtgtaataccttagtactgtccccttctatttatgtgtttaatagaggtaggcagttttatgagttttacaatgatgtaaaaccaccagttcttgatgtggatgacgtttagttaatccaaacattatgagtagtgtaactacaccagcacctgtttacacctggactgctgatgaagctattaaattcctaaaggaatggaacttttctttgggtattatactactttttattacagtcatattgcaatttggatatacaagtcgcagtatgtttgtttatgttattaagatgatcattttgtggcttatgtggccccttactatcatcttaactattttcaattgcgtgtatgcgttgaataatgtgtatcttggcttctctatagtttttactatagtggccattatcatgtggattgtgtattttgtgaatagtatcaggttgtttattagaactggaagttggtggagtttcaacccagaaacaaacaacttgatgtgtatagatatgaaaggaaggatgtatgttaggccgataattgaggactaccatacccttacggtcacaataatacgtggtcatctttacatgcaaggtataaaactaggtactggctattctttgtcagatttgccagcttatgtgactgttgctaaggtctcgcacctgctcacgtataagcgtggttttcttgacaagataggcgatactagtggttttgctgtttatgttaagtccaaagtcggtaattaccgactgccatcaacccaaaagggttctggcttggacaccgcattgttgagaaataatatctaaactttaaggatgtcttttactcctggtaagcaatccagtagtagagcgtcctctggaaatcgttctggtaatggcatccttaagtgggccgatcagtccgatcaatctagaaatgttcaaaccaggggtagaagagctcaatccaagcaaactgctacttctcagcaaccatcaggagggaatgttgtaccctactattcttggttctctggaattactcagtttcaaaagggaaaggagtttgaatttgcagagggacaaggtgtgcctattgcaccaggagtcccagctactgaagctaaggggtactggtacagacacaacagacgttcctttaaaacagccgatggcaaccagcgtcaattgctgccacgatggtatttttactatcttggaacaggaccgcatgccaaagaccagtatggcaccgacattgacggagtctactgggtcgctagtaaccaggctgatgtcaataccccggctgacattctcgatcgggacccaagtagcgatgaggctattccgactaggtttccgcctggcacggtactccctcagggttactatattgaaggctcaggaaggtctgctcctaattccagatctacttcacgcgcatccagtagagcctctagtgcaggatcgcgcagtagagccaattctggcaatagaacccctacctctggtgtaacacctgatatggctgatcaaattgctagtcttgttctggcaaaacttggcaaggatgccgctaagccacagcaagtaactaagcagactgccaaagaaatcagacagaaaattttgaataagccccgccagaagaggagccccaataaacaatgcactgttcagcagtgttttgggaagagaggccccaatcagaattttggtggtggagaaatgttaaaacttggaactagtgatccacagttccccattcttgcagaactcgcacccacagctggtgcgtttttctttggatcaagattagagttggccaaagtgcagaatttgtctgggaatcttgacgaaccccagaaggatgtttatgaattgcgctataatggcgcaattagatttgatagtacactttcaggttttgagaccataatgaaggtgttgaatgagaatttgaatgcataccaacaacaggatggtacgatgaatatgagtccaaaaccacagcgtcagcgtggtcagaagaacggacaaggagaaaatgataatataagtgttgcagcgcccaaaagccgtgtgcagcaaaataagattagagagttgactgcagaggacatcagccttcttaagaagatggatgagccctttactgaagacacctcagaaatataagagaatgaaccttatgtcggcacctggtggtaacccctcgcaggaaagtcgggataaggcactctctatcagaatggatgtcttgctgctataatagatagagaaggttatagcagactatagattaattagttgaaagttttgtgtggtaatgtatagtgttggagaaagtgaaagacttgcggaagtaattgccgacaagtgcccaaggggaagagccagcatgttaagttaccacccagtaattagtaaatgaatgaagttaattatggccaattggaagaatcac

SEQ ID NO: 23 - DNA, 31032 bp, Coronavirus
gattgtgagcgatttgcgtgcgtgcatcccgcttcactgatctcttgttagatctttttataatctaaactttataaaaacatccactccctgtattctatgcttgtgggcgtagatttttcatagtggtgtctatattcatttctgctgttaacagctttcagccagggacgtgttgtatcctaggcagtggcccacccataggtcacaatgtcgaagatcaacaaatacggtctcgaactacactgggctccagaatttccatggatgtttgaggacgcagaggagaagttggataaccctagtagttcagaggtggatatagtatgctccaccactgcgcaaaagctggaaacaggcggaatttgtcctgaaaatcatgtgatggtggattgtcgccgacttcttaaacaagagtgttgtgtgcagtctagcctaatacgtgaaattgttatgaatacacgtccatatgatttggaggtgctacttcaagatgctttgcagtcccgcgaagcagttttggttacaccccctctaggtatgtctctggaggcatgctatgtgagaggttgtaatcctaatggatggaccatgggtttgtttcggcgtagaagtgtgtgtaacactggtcgttgcgctgttaacaagcatgtggcctatcagctatatatgattgatcctgcgggtgtctgttttggtgcaggtcaatttgtgggttgggttatacccttagcctttatgcctgtgcaatcccggaaatttattgttccttgggttatgtacttgcgtaagtgtggcgaaaagggtgcctacaataaagatcataaacgtggcggttttgaacacgtttataattttaaagttgaggatgcttacgacctggttcatgatgagcctaagggtaagttttctaagaaggcttatgctttaattagaggataccgtggtgttaaaccgcttctctatgtagaccagtatggttgtgattatactggtggtcttgcagatggcttagaggcttatgctgataagacattgcaagaaatgaaggcattatttcctatttggagccaggaactcccttttgatgtaactgtggcatggcacgttgtgcgtgatccacgttatgttatgagactgcagagtgcttctactatacgtagtgttgcatatgttgctaaccctactgaagacttgtgtgatggttctgttgttataaaggaacctgtgcatgtttatgcggatgactctattattttacgtcaacataatttagttgacattatgagttgtttttatatggaggcagatgcagttgtaaatgctttttatggtgttgatttgaaagattgtggttttgttatgcagtttggttatattgactgcgaacaagacttgtgtgattttaaaggttgggttcctggtaatatgatagatggttttgcttgcactacttgtggtcatgtttatgagacaggtgatttgctagcacaatcttcaggtgttttgcctgttaatcctgtattgcatactaagagtgcagcaggttatggtggttttggttgtaaggattcttttaccctgtatggccaaactgtagtttattttggaggttgtgtgtattggagtccagcacgtaatatatggattcctatattaaaatcttctgttaagtcttatgacggtttggtttatactggagttgtaggttgcaaggctattgtaaaggaaacaaatctcatttgcaaagcgttgtaccttgattatgttcaacacaagtgtggcaatttacaccagcgggagttgctaggtgtgtcagatgtgtggcataaacaattgttattaaatagaggtgtgtacaaacctcttttagagaatattgattattttaatatgcggcgcgctaaatttagtttagaaacttttactgtttgtgcagatggttttatgccttttcttttagatgatttggttccgcgcgcatattatttggcagtaagtggtcaagcattttgtgactacgcaggtaaaatctgccatgctgttgtgtctaagagtaaagagttacttgatgtgtctctggattctttaggtgcagctatacattatttgaattctaaaattgttgatttggctcaacattttagtgattttggaacaagtttcgtttctaaaattgttcatttctttaagacttttactactagcactgctcttgcatttgcatgggttttatttcatgttttgcatggtgcttatatagtagtggagagtgatatatattttgttaaaaacattcctcgttatgctagtgctgttgcacaagcatttcggagtgttgctaaagttgtactggactctttaagagttacttttattgatggcctttcttgttttaagattggacgtagaagaatttgtctttcaggcagtaaaatttatgaagttgagcgtggcttgttacattcatctcaattgccattagatgtttatgatttaaccatgcctagtcaagttcagaaaaccaagcaaaaacctatttatttaaaaggttctggttctgatttttcattagcggatagtgtagttgaagttgttacaacttcacttacaccatgtggttattctgaaccacctaaagttgcagataaaatttgcattgtggataatgtttatatggccaaggctggtgacaaatattaccctgttgtggttgatggtcatgttggacttttggatcaagcatggagggttccttgtgctggaaggtgtgttacatttaaggaacagcctacagtaaatgagattgcaagcacgcctaagactattaaagttttttatgagcttgacaaagattttaatactattttaaacactgcatgtggagtgtttgaagtggatgatactgtggatatggaggaattttatgctgtggtgattgatgccatagaagagaaactttctccatgtaaggagcttgaaggtgtaggtgctaaagttagtgcctttttacagaaattagaggataattccctatttttatttgatgaggctggtgaggaagttcttgctcctaaattgtattgtgcttttacagctcctgaagatgatgactttcttgaagaaagtggtgttgaagaagatgatgtagaaggtgaggaaactgatttaactgtcacaagtgctggagagccttgtgttgccagtgaacaggaggagtcttctgaaatcttagaggacactttggatgatggtccatgtgtggagacatctgattcacaagttgaagaagatgtacaaatgtcggattttgttgatcttgaatctgtgattcaggattatgaaaatgtttgttttgagttttatactacagaaccagaatttgttaaagttttggatctgtatgttcctaaagcaactcgcaacaattgctggttgcgatcagttttggcagtgatgcagaaactgccctgtcaatttaaagataaaaatttgcaggatctttgggtgttatataagcaacagtatagtcagttgtttgttgataccttggttaataagatacctgctaatattgtagttccacaaggtggttatgttgctgattttgcatattggttcttaaccttatgtgattggcagtgtgttgcatactggaaatgcattaaatgtgatttagctcttaagcttaaaggcttggatgctatgttcttttatggcgatgttgtctcacatgtgtgcaagtgtggtgagtctatggtacttattgatgttgatgtgccatttacagcccactttgctcttaaagataagttgttttgtgcatttattactaagcgtagtgtgtacaaagcagcttgtgttgtggatgttaatgatagtcattctatggctgttgttgatggtaaacaaattgatgatcatcgtatcactagtattactagtgataagtttgattttattattgggcatggtatgtcattttcaatgactacttttgaaattgcccaattgtatggttcttgtataacacctaatgtatgttttgttaaaggtgatataattaaagtttctaagcgtgttaaagcagaagtcgttgtaaatcctgctaatggccatatggcacatggtggtggtgttgcaaaggctattgcagtagcagctggacagcagtttgttaaagagaccaccgatatggttaagtctaaaggagtttgtgctactggagattgttatgtctctacagggggcaaattatgtaaaactgtgcttaatgttgttggacctgatgcgaggacacagggtaaacaaagttatgcattgttagagcgtgtttataaacatcttaacaaatatgattgtgttgttacaactttgatctcagctggtatatttagtgtgccttctgatgtgtctttaacatatctacttggtactgctaagaaacaagttgttcttgttagcaataatcaagaggattttgatcttatttctaagtgtcagataactgccgttgagggcactaagaaattggcagagcgtctttcttttaatgttgggcgttctatcgtttacgaaacagatgctaataagttgattttaagcaatgacgttgcatttgtttcgacatttaatgtcttacaggatgttttatccttaagacatgatatagcacttgatgatgatgcacgaacctttgttcagagcaatgttgatgttgtacctgagggttggcgtgttgtcaataagttttatcaaattaatggtgttagaaccgttaagtattttgagtgtcccgggggcatagatatatgcagccaggataaagtttttggttatgtacagcagggtagttttaataaggctactgttgctcaaattaaagccttgtttttggataaagtggacatcttgctaactgttgatggtgttaatttcactaacaggtttgtgcctgtaggtgaaagttttggtaagagtctaggaaatgtgttttgtgatggagttaatgtcacgaaacataagtgtgatataaattataaaggtaaagtctttttccagtttgataatctttctagtgaagatttaaaggctgtaagaagttcttttaattttgatcagaaggaattgcttgcctactacaacatgcttgttaattgttctaagtggcaggttgtttttaatggtaagtatttcacttttaagcaagctaataacaattgttttgttaatgtttcttgcttaatgctccagagtttgaatctgaaatttaaaattgttcaatggcaggaggcgtggcttgaatttcgttctggccgccccgctagatttgtatctttggttttggctaaaggtgggtttaaatttggggatcctgctgattctagagatttcttgcgtgttgtgtttagtcaagttgatttgacaggggcaatatgtgattttgaaattgcatgtaaatgtggtgtaaagcaggaacagcgtactggtgtggacgctgttatgcattttggtacattgagtcgtgaagatcttgagattggctacaccgtggattgttcttgcggtaaaaagctaattcattgtgtacgatttgatgtaccatttttaatttgcagtaatacacctgctagtgtaaaattacctaagggtgtaggaagtgcaaatatttttaaaggtgataaggttggtcattatgttcatgttaagtgtgaacagtcttatcagctttatgatgcttctaatgttaagaaggttacagacgttactggcaatttgtcagattgtttgtatcttaaaaatttgaaacaaacttttaaatcggtgttaaccacctattatttggatgatgttaagaaaattgagtataaacctgacttgtcacaatattattgtgacggaggtaagtattatactcagcgtattattaaagcccaatttaaaacatttgagaaagtagatggtgtgtatactaactttaaattgataggacacaccgtctgtgatattcttaatgctaagttgggttttgatagctctaaagagtttgttgaatataaggttactgagtggccaacagctacaggtgatgtggtgttggctactgatgatttgtatgttaagagatatgaaaggggttgtattacttttggtaaacctgttatatggttaagccatgagcaagcttccctcaattctttaacatattttaatagacctttattggttgatgagaataaatttgatgttttaaaagtggatgatgttgacgatggtggtgatatctcagagagtgatgctaaagaacccaaagaaatcaacattattaagttaagtggtgttaaaaaaccatttaaggttgaagatagtgtcattgttaatgatgatactagtgaaatcaaatatgttaagagtttgtctatagttgatgtgtatgatatgtggcttacaggttgtaggtgtgttgttaggactgctaatgctttgagcagagcagttaacgtacctacaatacgtaagtttataaaatttggtatgactcttgttagtataccaattgatttgttaaatttaagagagattaagcctgtttttaatgtggttaaagctgtgcgaaataaaatttctgcatgctttaattttattaaatggctttttgtcttattatttggctggattaaaatatccgctgataataaagtaatttacaccacagaagttgcatcaaagcttacgtgtaagcttgtagctttagcttttaaaaatgcatttttgacatttaagtggagtgtggttgctagaggtgcttgcattatagcgactatatttctattgtggtttaattttatatatgccaatgtaatttttagtgatttttatttgcctaaaatcggtttcttgccgacttttgttggtaagatcgcacagtggattaagaacacttttagtcttgtaactatttgtgatctatattccattcaggatgtgggttttaagaatcagtattgtaatggaagtatcgcatgtcagttctgcttggcaggatttgatatgttagataattataaagccattgatgtagtacagtatgaagctgataggagagcatttgttgattatacaggtgtgttaaagattgtcattgaattgatagttagttacgccctgtatacggcatggttttacccattgtttgctcttattagtattcagatcttgaccacttggctgcctgagctttttatgcttagtacattacattggagtgttaggttgctggtgtctttagctaatatgttaccagcacatgtgtttatgaggttttatattattattgcctcttttattaagctgtttagcttgtttaggcatgttgcctatggttgtagtaaatctggttgtttgttttgttacaagaggaatcgtagtctacgtgttaaatgtagtactattgttggtggcatgatacgctattacgatgctatggctaatggtggcactggcttttgttcaaaacatcaatggaattgcattgattgtgattcttataaaccaggtaatacttttattactgttgaggccgctcttgatttatctaaggaattgaaacggcctattcagcctacagatgttgcttatcatacggttacggatgttaagcaagttggttgttatatgcgcttgttctatgatcgtgatggacagcgcacatatgatgatgttaatgctagtttgtttgtggattatagtaatttgctacattctaaggttaagagtgtgcctaatatgcatgttgtggtagtggaaaatgatgccgataaagctaattttcttaatgctgctgtattttatgcacagtctttgtttagacctattttaatggttgataaaaatctgataactactgctaatactggtacgtctgttacagaaactatgtttgatgtttatgtggatacatttttgtctatgtttgatgtggataaaaagagtcttaatgctttaatagcaactgcgcattcttctataaaacagggtacgcagatctgtaaagttttggatacctttttaagctgtgctcgtaaaagttgttctattgattcagatgttgatactaagtgtttagctgattctgtcatgtctgctgtatcggcaggccttgaattgacggatgaaagttgtaataacttggtgccaacatatttgaagggtgataacattgtggcagctgatttaggtgttctgattcaaaattctgctaagcatgtgcagggtaatgttgctaaaatagccggtgtttcctgtatatggtctgtggatgcttttaatcagcttagttctgatttccagcataaattgaagaaagcatgttgtaaaactggtttgaaactgaagcttacttataataagcagatggctaatgtctctgttttaactacaccctttagtcttaaagggggtgcagtttttagttattttgtttatgtatgttttgtgttgagtttggtttgttttattggattgtggtgcttaatgcccacttacacagtacacaaatcagattttcagcttcccgtttatgccagttataaagttttagataatggtgttattagagatgttagcgttgaagatgtttgtttcgctaacaaatttgaacaatttgatcaatggtatgagtctacatttggtctaagttattatagtaacagtatggcttgtcccattgttgttgctgtagtagaccaggattttggctctactgtgtttaatgtccctaccaaagtgttacgatatggttaccatgtgttgcactttattacacatgcactttctgctgatggagtgcagtgttatacgccacatagtcaaatatcgtattctaatttttatgctagtggctgtgtgctttcctctgcttgcactatgtttgcaatggccgatggtagtccacaaccttattgttatacagatgggcttatgcagaatgcttctctgtatagttcattggtacctcatgtgcggtataatcttgctaatgctaaaggttttatccgttttccagaagtgttgcgagaaggacttgtgcgtattgtgcgtactcgttctatgccgtattgcagagttggattatgtgaggaagctgatgagggtatatgctttaattttaatggttcttgggtgcttaataatgattattatagatcattgcctgggaccttttgtggtagagatgtttttgacttaatttatcagctgtttaaaggtttagcacagcctgtggatttcttggcattgactgctagttccattgctggtgctatacttgctgtaattgttgttttggtgttttattacttaataaagcttaaacgtgcttttggtgattacaccagtattgtttttgttaatgtgattgtgtggtgtgtaaattttatgatgctttttgtgtttcaagtttaccctacactttcttgtgtatatgctatttgttatttttatgccacgctttatttcccttcggagataagtgtgataatgcatttacaatggctagttatgtatggcactattatgcctttatggttttgtttgctatatatatctgttgttgtttcaaatcatgctttttgggtattttcttactgcagacagcttggtacttctgttcgtagtgatggtacatttgaagaaatggctcttactacttttatgattacaaaagattcttattgtaagcttaagaattctttgtctgatgttgcttttaatagatatttgagtttgtataataaatataggtattacagcggtaaaatggatactgctgcatatagggaggctgcttgttctcagttggctaaagcaatggatacatttaccaataataatggtagtgatgtgctttaccaaccgcctactgcttccgtttcaacttcattcttgcaatctggtattgtgaaaatggttaatcctacttctaaggtagaaccatgtattgtcagtgttacctatggtaatatgacattgaatggtttatggttgggtgataaggtctactgtcccagacatgtgatatgttctgcttcagatatgactaatccagattatacaaatttgttgtgtagagtaacatcaagtgattttactgtattgtttgatcgtctaagccttacagtgatgtcttatcaaatgcagggttgtatgcttgttcttacagtgaccctgcaaaattctcgtacgccaaaatatacatttggtgtggttaaacctggtgagacttttactgttttagctgcttataacggcaaaccacaaggagcctttcatgtgactatgcgtagtagttataccattaagggttcctttttatgcggatcttgtggatctgttgtttatgtaataatgggtgattgtgttaaatttgtgtatatgcatcaattggagcttagtactggttgtcatactggtactgatttcaatggggatttttatggtccttataaggatgctcaggttgtccaattgcccgttcaggattatatacaatctgttaattttgtagcatggctttatgctgctatacttaataattgtaattggtttgtacaaagtgataagtgttctgttgaagattttaatgtgtgggctttgtctaatgggtttagccaagttaagtctgatcttgttatagatgctttagcttctatgactggtgtgtctttggaaacactattggctgctattaagcatcttaagaatggttttcaaggacgtcagattatgggtagttgctcctttgaggatgaattgacacctagcgatgtttatcaacaactcgctggtatcaagttacaatcaaagcgtactagattggttaaaggcattgtttgttggattatggcttctacatttttgtttagttgtataattacagcatttgtgaaatggactatgtttatgtatgtaactactaatatgcttagtattacgttttgtgcactttgtgttataagtttgaccatgttgttggttaaacataagcatctttatttgactatgtatataattcctgtgctttttacactgctgtataacaactatttggttgtgtacaagcagacatttagaggctatgtttatgcatggctatcatattatgttccatcagttgagtatacttatactgatgaagtaatttatggcatgttattgcttataggaatggtctttgttacattacgtagcattaaccagtatttgttctcttttataatgtttgttggtcgtgtgatttctgttgtctctttgtggtacatgggttctaacttagaggaagaaattcttcttatgttggcttctctttttggtacttacacatggacaacagctttatctatggctgcagcaaaggttattgctaagtgggttgccgtgaatgttttgtatttcacagatatacctcaaattaagatagtgcttgtatgctatttgtttataggttatattattagctgttattggggtttgttttccttgatgaacagtttgtttagaatgcctttgggtgtttataattataaaatttcagtacaggaattaagatatatgaatgctaatggattgcgccctcctaagaatagttttgaagcccttatgcttaattttaagcttttgggtattggaggtgtgccaattattgaagtatctcaatttcaatcaaaattgactgatgttaaatgtgctaatgttgtcttgcttaattgcttgcaacatttgcatgttgcttctaactctaagttgtggcaatattgtagcactttgcacaatgaaatacttgccacttctgatctgggtgttgcttttgaaaagcttgctcagttgttaattgttttgtttgctaatccagctgctgtggatagcaagtgcctgactagtattgaagaagtttgcgacgattacgcaaaggacaatactgttttgcaggctttacagagtgaatttgttaatatggctagcttcgttgaatatgaagttgctaagaaaaatcttgatgaggcgtgttctagtggttctgctaatcaacagcagttaaaacagctagagaaagcctgtaatattgctaaatctgcttatgaacgcgaccgtgctgtagcaagaaagttggagcgtatggcagatttggctctcactaatatgtataaagaagctagaattaatgataagaagagtaaggttgtttctgccttgcaaactatgctttttagtatggtgcgtaagttagataatcaagctctgaattcaatattagataatgctgtgaagggttgtgtaccattgaatgcaatcccttcattggcagcaaatactctgactataattgtaccagataaaagtgtttatgatcaggtagttgacaatgtctatgttacctatgcgggtaatgtatggcagattcaaactatccaagattcagatggtacaaataagcagttgcatgagatatctgatgattgtaactggccactagttattattgcaaatcggcataatgaggtatctgctaccgctttgcaaaataatgaattaatgcctgctaagttgaaaactcaggttgttaatagtggtccagatcagacttgtaatacacctactcaatgttactataataatagttacaatgggaagattgtttatgctatacttagtgatgttgatggtcttaagtatacaaaaattcttaaagatgatggcaattttgttgttttggagttagatcctccttgtaaatttactgttcaagatgttaaaggtcttaaaattaagtacctttattttgtaaaaggttgtaacacactagcaagaggctgggttgttggtacaatttcttctacagttagattgcaagctggaactgctactgagtatgcttccaactcatctatattatctttatgtgcgttttctgtagatcctaagaaaacgtatttagattttatacaacagggaggaacacctattgccaattgtgttaaaatgttgtgtgaccatgctggtaccggtatggccattactgttaaacccgatgctaccactagtcaggattcatatggtggtgcgtctgtttgtatatattgccgcgcacgagttgaacacccagatgttgatgggttgtgcaaattacgcggcaagtttgtacaagtgcctgtaggtataaaagatcctgtgtcttatgttttgacacatgatgtttgtcaagtttgtggattttggcgggatggaagctgttcatgtgttagcactgacactactgttcagtcaaaagatactaattttttaaacgggttcggggtacgagtgtagatgcccgtctcgtaccctgtgccagtggtttatctactgatgtacaattaagggcatttgatatttgcaatgctagtgttgctggcattggtttacatttaaaagttaattgctgccgttttcagcgtgttgatgagaacggtgataaattagatcagttctttgttgttaagaggacagatctgactatatataatagagagatggaatgctatgagcgtgtaaaagattgtaagtttgtggctgaacacgatttctttacatttgatgtagaaggtagtcgtgtgccacacattgtacgcaaggatttaacaaagtatactatgttggatctttgctatgcattgcgacattttgatcgcaatgattgcatgctgctttgtgacattctctctatatatgctggttgtgaacaatcctactttactaagaaggattggtatgattttgttgaaaatcctgatattattaatgtttataaaaagctaggacctatttttaatagagccctagttagcgctactgagtttgcagacaaattggtggaggtaggcttagtaggcattttaacacttgataaccaagatttaaatggtaaatggtatgattttggtgactatgttattgcagccccagggtgtggtgttgctatagcagactcttattattcttatatgatgcctatgctgaccatgtgtcatgcattggattgtgaattgtatgtgaataatgcttatagactatttgatcttgtacagtatgattttactgattacaagctcgaattgtttaataagtattttaagcactggagtatgccataccatcctaacacggttgattgtcaggatgatcggtgtatcatacgttgtgctaattttaacatactttttagtatggttttacctaatacatgttttgggcctcttgttaggcaaatttttgtggatggtgtgccttttgttgtttcaattggctaccattataaagaacttggtattgtgatgaacatggatgtggatacacatcgttatcgcttgtctttaaaagacttgcttttatatgctgctgatccagctttgcatgtagcttctgctagtgcattgtatgatttacgcacttgctgttttagtgttgcggctataacaagcggtgtaaaatttcaaacagttaaacctggtaattttaatcaggatttttatgattttattttaagtaagggcctgcttaaagagggtagttcagttgatctgaagcactttttctttacgcaggatggtaatgctgctattactgattataattattataagtacaatttgcccaccatggtggacattaagcagttgttgtttgttttggaagttgtttataagtattttgagatttatgatggtgggtgtataccggcatcacaagtcattgttaataattatgataagagtgctggctatccatttaataaatttggaaaagccaggctctattatgaagcattatcatttgaggagcaggatgaaatttacgcctatactaagcgcaatgtcctgccaacacttactcaaatgaatttgaaatatgctattagtgctaagaatagagcccgcactgttgctggtgtttccatacttagtactatgactggcagaatgtttcatcaaaaatgtttgaaaagtatagcagctacacgtggtgttcctgttgttataggcaccactaagttttatggcggctgggatgatatgttacgtcgccttattaaagatgttgataatcctgtacttatgggttgggattatcctaagtgtgatcgtgctatgccaaacatactacgtattgttagtagtctggtcttggcccgaaaacatgaggcatgttgttcgcaaagcgataggttttatcgacttgcgaatgaatacgcacaagttctgagtgaaattgttatgtgtggtggctgttattatgttaagcctggtggcactagtagtggtgatgcaactactgcttttgctaattcagtttttaacatatgtcaagctgtttcagccaatgtatgtgctttaatgtcatgcaatggtaataagattgaagatttgagtatacgtgctcttcagaagcgcttatactcacatgtgtatagaagtgatatggttgattcaacctttgtcacagaatattatgaatttttaaataagcattttagtatgatgattttgagtgatgatggcgttgtgtgttataattctgattatgcgtccaaagggtatattgctaatataagtgcctttcaacaggtattgtattatcaaaataacgtttttatgtcagaatccaaatgttgggttgaaaatgacataaacaatggacctcatgaattctgttcacaacatacaatgcttgtaaagatggatggggacgatgtctatcttccatatcctgatcctagtcgtatattaggagctggatgttttgtagatgatttgttaaagactgatagtgttcttttaatagaacgatttgtaagtcttgcaatagatgcttatccacttgtgtaccacgaaaatgaagaataccaaaaggtttttcgtgtttatttggagtatataaagaagttgtacaatgaactgggtaatcagatcttggatagctacagtgttattttaagtacttgtgatggacaaaagtttactgatgagtccttttacaagaacatgtatttaagaagtgcagttatgcagagtgttggagcttgcgtggtctgctcttctcaaacatcattacgttgtggcagttgcatcagaaagcctcttctttgctgcaagtgttgttacgatcatgttatggcaactgatcataaatatgttttgagtgtttcaccatatgtgtgtaacgcaccaggatgtgatgtaaatgatgttaccaaattgtatctaggtggtatgtcatattattgtgaagatcataagccacaatattcgtttaagttggtaatgaatggtatggtttttggtctatataaacaatcttgtacaggatctccgtacatagatgattttaatcgtatagctagttgtaaatggactgatgttgatgattacatactggctaatgaatgtacagagcgcttgaaattgtttgctgcagaaacgcaaaaggcgactgaggaagcctttaagcagagttatgcatcagcaacaatacaagagattgttagtgagcgcgaattgattctctcttgggagattggaaaagtgaagccaccacttaataaaaattatgtttttactggctaccattttactaaaaatggcaagacagttttaggtgagtatgtttttgataagagtgagttgactaatggtgtgtattatcgcgccacaaccacttataagctatctgtaggagatgtttttgttttaacctctcattcagtagctaatttaagtgctcctacgcttgtgccgcaggagaattatagtagtattagatttgctagtgtttatagtgtgcttgagacatttcagaacaatgttgtgaactatcaacacattggtatgaaacgttattgcaccgtgcaaggacctcctggtacaggaaagtcacatcttgctattggtcttgctgtatattattgtacagcacgtgtagtatacactgcggccagccatgcagctgttgacgcattgtgtgaaaaagcatacaaatttttgaatataaatgattgcactcgtattgttcctgccaaggtcagggtggagtgctatgataagtttaaaattaatgacaccactcgtaagtatgtgtttactactataaatgcattacctgagatggtgactgatattgttgttgtagatgaagttagtatgcttaccaattatgagctttctgttattaatgctcgtattcgcgctaagcattatgtttatattggtgatcctgctcaattgccagcaccacgtgtgttattgagcaagggtacacttgaacctaaatattttaacactgttactaagcttatgtgttgcttagggccagacatttttcttggtacatgttatagatgtcctaaggaaatcgttgatacagtgtctgccttggtttatgaaaataagcttaaggctaagaatgaaagtagttcattgtgttttaaggtctattataaaggcgttacaacacatgaaagttctagtgctgtaaatatgcagcagatttatttgattaataagtttttgaaggctaaccctttgtggcataaagccgtttttattagcccatataatagtcagaactttgcagctaggcgcgttttgggtttgcaaacccaaaccgtggattctgcgcaaggttctgaatatgattatgttatatattcacagactgcagaaacagcgcattctgtaaatgttaatcgcttcaatgttgctattactcgagccaagaaaggtattctttgcgttatgagtaatatgcagttgtttgaagcattacagtttactacattgaccgtagataaagtgccacaggccgttgaaacgagagttcaatgtagtaccaatttatttaaagattgtagcaagagttatagtggttaccacccagctcatgctccttcatttttggcagtagatgacaaatataaggcaactggcgatttagccgtgtgtcttggtattggagattctgctgttacatattcaagattaacatcactcatgggttttaaactggatgttacccttgatgggtattgtaagctttttataactaaagaagaagctgttaaacgcgtgcgtgcttgggttggctttgatgctgaaggtgctcatgccacgcgtgatagcattgggacaaatttcccacttcaattagggttttccacaggaattgattttgttgtggaagccactggtttgtttgctgatagagatggttacagctttaaaaaggctgtggctaaagctcctcctggtgaacaatttaagcatctcatccctttgatgacgagaggtcagcgctgggatgttgttagacctagaatagtacaaatgtttgcagatcatttaattgatctgtctgattgtgttgtgctagttacatgggcagccaactttgagctcacttgtctccgctactttgcaaaagtaggtcgtgagatctcttgtaatgtgtgcactaaacgtgccacagcttacaattctagaactggttactatggttgttggcgccatagtgttacatgtgattacttgtataatccacttattgttgatattcaacagtggggatatattggttctttatcaagtaatcatgatttatattgtagtgtccataaaggagcacatgttgcctcctctgatgctataatgacacggtgtttggccgtttatgattgtttttgcaataatattaattggaatgtggagtatcccatcatttcaaatgagttaagtattaatacctcttgtagggtcttgcagcgtgttatgcttaaagctgccatgctctgcaacagatatactttgtgttatgatattggcaatccaaaagcgattgcctgtgtcaaagattttgattttaagttctatgatgcccaaccaattgttaagtctgtcaagactcttttgtatttttttgaggcacataaggactcttttaaagatggtttgtgtatgttttggaactgtaatgtggataagtatccaccgaatgcagttgtatgtagatttgacacgagagtgttgaataatttaaatcttcctggctgtaatggaggtagtttgtatgttaacaaacatgcattccacactaaacccttttctagggcagcctttgagcatttgaagcctatgccatttttctattattcagatacgccttgcgtgtatatggatggcatggatgctaagcaggttgattatgtacctttgaaatccgccacttgcatcacaagatgcaatttagtgggtgcagtttgtttaaaacatgctgaagagtatcgtgagtacctaaattcttacaatacagctactacagcaggttttactttttgggtctataagacatttgatttttataatttgtggaatacgttcaccaagctacaaagcttggagaatgttgtatataatttagtcaagactggtcattatacaggacaggctggtgaaatgccttgtgccattataaatgataaagttgtggctaagatcgataaggaggatgttgtcatttttattaataatacaacatatcctactaatgtggctgttgaattatttgccaagcgcagtattcgacaccatccagagcttaagctctttagaaatttgaatatagacgtgtgctggaagcacgtcatttgggattatgctagagaaagtatattttgcagtaatacctatggtgtctgcatgtatacagatttaaagttcattgataaattgaatgtcctttttgatggtcgtgataatggtgctcttgaagcttttaaacgctctaataatggcgtttacatttccacgacaaaagttaagagtctttcgatgataagaggtccaccgcgtgctgaattaaatggcgtagtggtggacaaggttggagacacagattgtgtgttttattttgctgtgcgtaaagagggtcaggatgtcatcttcagccaattcgacagcctgagagtcagctctaaccagagcccacaaggtaatctggggagtaatgaacccggtaatgtcggtggtaatgatgctctggcaacctccactatctttacacaaagccgtgttattagctcttttacatgtcgtactgatatggaaaaagattttatagctttagatcaagatgtgtttattcagaagtatggtttggaggactatgcctttgaacacattgtttatggtaatttcaaccagaagattattggtggtttgcatttgttaataggcttgtaccgaagacagcaaacttccaatctggttattcaggagtttgtttcatacgactccagcatacactcttattttatcactgatgagaagagtggtggtagtaagagtgtttgcactgttatagatattttgttggatgattttgtggctcttgtcaagtcacttaatcttaactgtgtgagtaaggttgttaatgttaatgttgattttaaagattttcagttcatgctttggtgtaacgatgagaaagttatgactttctatcttcgtttgcaagctgcatctgactggaagcctggttattctatgcctgtattatataagtatttgaattccccaatggaaagagttagtctctggaattatgggaagccagttactttgcctacaggctgtatgatgaatgttgctaagtatactcagttatgtcaatatctgaatactacaacattagctgtacctgttaatatgcgagttttgcatttaggtgcaggttcagaaaaaggagtagcaccgggttctgcagttcttaggcagtggttgcctgctggtactattcttgtagataatgatttatacccatttgtgagtgacagtgtcgctacatattttggggattgtataaccttaccctttgattgtcaatgggatttgataatctctgatatgtatgaccctattactaagaacataggggagtacaatgtaagtaaagatggtttctttacatacatttgtcatatgattcgcgacaagttagctctgggtggcagtgttgctataaaaataacagagttttcttggaatgcagaattatataagttaatggggtattttgcattttggacggttttctgcacaaatgcaaatgcttcttctagtgaagggtttttaattggcataaattatttgggtaagcccaaggttgagatagatggaaatgttatgcatgccaattatttgttttggagaaattccacagtttggaacgggggtgcttatagcctgtttgatatggctaaattcccgcttaagttggctggtactgccgtaataaatttaagagcagaccagattaatgatatggtttattcccttcttgaaaagggtaaactacttgttagagatacaaataaagaagtttttgttggtgacagtatggttaatgtaatctaaactttaagaatggcagttgcttatgcagacaagcctaatcactttattaattttccacttacccagtttgagggttttgtgttaaattataaaggtttacaatttcaacttctcgatgaaggagtggattgtaaaatacaaacagcgccgcacattagtcttgctatgctggatattcagcctgaagactatagaagtgttgatgttgctattcaagaagttattgatgacatgcattggggtgagggctttcagattaaatttgataaccccctaatcctaggaagatgcatagttttagatgttaaaggtgtagaagaattgcatgatgatttagttaattacattcgtgataaaggttgtgttgctgaccaatccaggaaatggattggacattgcaccatagcccaactcacggatgctgcactttccattaaggaaaatgttgatttcataaacagcatgcaattcaattataaaatcactatcaacccctcatcaccggctagacttgaaatagttaagcttggtgctgaaaagaaagatggtttttatgaaaccatagttagccactggatgggaattcgttttgaatataatccacccactgataagctagctatgattatgggttattgttgtttagaagtggtgcgtaaagagctagaagaaggtgatcttcccgagaatgatgatgatgcttggtttaagctatcgtaccattatgaaaacaattcttggttctttcgacatgtctacaggaaaagttcttatttccgtaagtcttgtcaaaatttagattgtaattgtttggggttttatgaatctccagttgaagaagactaaactcagtgaaaatgtttttgcttcttagatttgttctagttagctgcataattggtagcctaggttttgataaccctcctaccaatgttgtttcgcatttaaatggagattggtttttatttggtgacagtcgttcagattgtaatcatgttgttaataccaacccccgtaattattcttatatggaccttaatcctgccctgtgtgattctggtaaaatatcatctaaagctggcaactccatttttaggagttttcactttaccgatttttataattacacaggcgaaggtcaacaaattattttttatgagggtgttaattttacgccttatcatgcctttaaatgcaccacttctggtagtaatgatatttggatgcagaataaaggcttgttttacactcaggtttataagaatatggctgtgtatcgcagccttacttttgttaatgtaccatatgtttataatggctctgcacaatctacagctctttgtaaatctggtagtttagttcttaataaccctgcatatatagctcgtgaagctaattttggggattattattataaggttgaagctgacttttatttgtcaggttgtgacgagtatatcgtaccactttgtatttttaacggcaagtttttgtcgaatacaaagtattatgatgatagtcaatattattttaataaagacactggtgttatttatggtctcaattctactgaaaccattaccactggttttgattttaattgtcattatttagttttaccctctggtaattatttagccatttcaaatgagctattgttaactgttcctacgaaagcaatctgtcttaacaagcgtaaggattttacgcctgtacaggttgttgattcacggtggaacaatgccaggcagtctgataacatgacggcggttgcttgtcaacccccgtactgttattttcgtaattctactaccaactatgttggtgtttatgatatcaatcatggggatgctggttttactagcatactcagtggtttgttatatgattcaccttgtttttcgcagcaaggtgtttttaggtatgataatgttagcagtgtctggcctctctattcctatggcagatgccctactgctgctgatattaatacccctgatgtacctatttgtgtgtatgatccgctaccacttattttgcttggcatccttttgggtgttgcggtcataattattgtagttttgttgttatattttatggtggataatggtactaggctgcatgatgcttagaccataatctaaacatgtttttgatacttttaatttccttaccaatggcttttgctgttataggagatttaaagtgtactacggtttccattaatgatgttgacaccggtgctccttctattagcactgatattgtcgatgttactaatggtttaggtacttattatgttttagatcgtgtgtatttaaatactacgttgttgcttaatggttactaccctacttcaggttctacatatcgtaatatggcactgaagggaactttactattgagcagactatggtttaaaccaccttttctttctgattttattaatggtatttttgctaaggtcaaaaataccaaggttattaaaaagggtgtaatgtatagtgagtttcctgctataactataggtagtacttttgtaaatacatcctatagtgtggtagtacaaccacatactaccaatttggataataaattacaaggtctcttagagatctctgtttgccagtatactatgtgcgagtacccacatacgatttgtcatcctaatctgggtaataaacgcgtagaactatggcattgggatacaggtgttgtttcctgtttatataagcgtaatttcacatatgatgtgaatgctgattacttgtatttccatttttatcaagaaggtggtactttttatgcatattttacagacactggtgttgttactaagtttctgtttaatgtttatttaggcacggtgctttcacattattatgtcctgcctttgacttgttctagtgctatgactttagaatattgggttacacctctcacttctaaacaatatttactagctttcaatcaagatggtgttatttttaatgctgttgattgtaagagtgattttatgagtgagattaagtgtaaaacactatctatagcaccatctactggtgtttatgaattaaacggttacactgttcagccaattgcagatgtttaccgacgtatacctaatcttcccgattgtaatatagaggcttggcttaatgataagtcggtgccctctccattaaattgggaacgtaagaccttttcaaattgtaattttaatatgagcagcctgatgtcttttattcaggcagactcatttacttgtaataatattgatgctgctaagatatatggtatgtgtttttccagcataactatagataagtttgctatacccaatggtaggaaggttgacctacaattgggcaatttgggctatttgcagtcttttaactatagaattgatactactgctacaagttgtcagttgtattataatttacctgctgctaatgtttctgttagcaggtttaatccttctacttggaataggagatttggttttacagaacaatttgtttttaagcctcaacctgtaggtgtttttactcatcatgatgttgtttatgcacaacattgttttaaagctccctcaaatttctgtccgtgtaaattggatgggtctttgtgtgtaggtaatggtcctggtatagatgctggttataaaaatagtggtataggcacttgtcctgcaggtactaattatttaacttgccataatgctgcccaatgtaattgtttgtgcactcccgaccccattacatctaaatctacagggccttacaagtgcccccaaactaaatacttagttggcataggtgagcactgttcgggtcttgctattaaaagtgattattgtggaggtaatccttgtacttgccaaccacaagcatttttgggctggtctgttgactcttgtttacaaggggataggtgtaatatttttgctaattttattttgcatgatgttaatagtggtactacttgttctactgatttacaaaaatcaaacacagacataattcttggtgtttgtgttaattatgatctttatggtattacaggccaaggtatttttgttgaggttaatgcgacttattataatagttggcagaaccttttatatgattctaatggtaatctctatggttttagagactacttaacaaacagaacttttatgattcgtagttgctatagcggtcgtgtttcagcggcctttcatgctaactcttccgaaccagcattgctatttcggaatattaaatgcaattacgtttttaataatactctttcacgacagctgcaacctattaactattttgatagttatcttggttgtgttgtcaatgctgataatagtacttctagtgttgttcaaacatgtgatctcacagtaggtagtggttactgtgtggattactctacaaaaagacgaagtcgtagagcgattaccactggttatcggtttactacttttgagccatttactgttaattcagtaaatgatagtttagaacctgtaggtggtttgtatgaaattcaaataccttcagagtttactataggtaatatggaggagtttattcaaacaagctctcctaaagttactattgattgttctgcttttgtctgtggtgattatgcagcatgtaaatcacagttggttgaatatggtagcttctgtgacaatattaatgctatactcacagaagtaaatgaactacttgacactacacagttgcaagtagctaatagtttaatgaatggtgtcactcttagcactaagcttaaagatggcgttaatttcaatgtagacgacatcaatttttcccctgtattaggttgtttaggaagcgattgtaataaagtttccagcagatctgctatagaggatttacttttttctaaagtaaagttatctgatgtcggtttcgttgaggcttataataattgtactggaggtgccgaaattagggacctcatttgtgtgcaaagttataatggtatcaaagtgttgcctccactgctctcagtaaatcagatcagtggatacactttggctgccacctctgctagtctgtttcctcctttgtcagcagcagtaggtgtaccattttatttaaatgttcagtatcgtattaatgggattggtgttaccatggatgtgttaagtcaaaatcaaaagcttattgctaatgcatttaacaatgctcttgatgctattcaggaagggtttgatgctaccaattctgctttagttaaaattcaagctgttgttaatgcaaatgctgaagctcttaataacttattgcaacaactctctaatagatttggtgctataagttcttctttacaagaaattctatctagactggatgctcttgaagcgcaagctcagatagacagacttattaatgggcgtcttaccgctcttaatgtttatgtttctcaacagcttagtgattctacactagtaaaatttagtgcagcacaagctatggagaaggttaatgaatgtgtcaaaagccaatcatctaggataaatttttgtggtaatggtaatcatattatatcattagtgcagaatgctccatatggtttgtattttatccactttagctatgtccctactaagtatgtcactgcgaaggttagtcccggtctgtgcattgctggtgatagaggtatagcccctaagagtggttattttgttaatgtaaataatacttggatgttcactggtagtggttattactaccctgaacccataactggaaataatgttgttgttatgagtacctgtgctgttaactatactaaagcgccggatgtaatgctgaacatttcaacacccaacctccatgattttaaggaagagttggatcaatggtttaaaaaccaaacatcagtggcaccagatttgtcacttgattatataaatgttacattcttggacctacaagatgaaatgaataggttacaggaggcaataaaagttttaaatcagagctacatcaatctcaaggacattggtacatatgagtattatgtaaaatggccttggtatgtatggcttttaattggctttgctggtgtagctatgcttgttttactattcttcatatgctgttgtacaggatgtgggactagttgttttaagatatgtggtggttgttgtgatgattatactggacaccaggagttagtaattaaaacatcacatgacgactaagttcgtctttgatttattggctcctgacgatatattacatcccttcaatcatgtgaagctaattataagacccattgaggtcgagcatattataatagctaccacaatgcctgctgtttagtgggtactgtgtcttatataactagtaaacctgtaatgccaatggctacaaccattgacggtacagattatactaatattatgcctagtactgtttctacaacagtttatttaggctgttctataggtattgacactagcaccactggttttacctgtttttcacggtactagttccaaaccatattataatttaggtagaccttataactttaagcattattaattgccaaagtttctaaggtcacgccctagtaatggacatctggagacctgagattaaatatctccgttatactaacggttttaatgtctcagaattagaagatgcttgttttaaatttaactataaatttcctaaagtaggatattgtagagttcctagtcatgcttggtgccgtaatcaaggtagcttttgtgctacactcactctttatggcaaatccaaacattatgataaatattttggagtaataactggttttacagcattcgctaatactgtagaggaggctgttaacaaactggttttcttagctgttgactttattacttggcggagacaggagttaaatgtttatggctgatgcttattttgcagacactgtgtggtatgtggggcaaataatttttatagttgccatttgtttattggttataatagttgtagtggcatttttggcaacttttaaattgtgtattcaactttgcggtatgtgtaataccttaggactgtccccttctatttatgtgtttaatagaggtaggcagttttatgagttttacaacgatgtaaaaccaccagttcttgatgtggatgacgtttagttaatccaaacattatgagtagtgtaactacaccagcaccagtttacacctggactgctgatgaagctattaaattcctaaaggaatggaacttttctttgggtattatactactttttattacaatcatattgcaatttggatatacaagtcgcagtatgtttgtttatgttattaagatgatcattttgtggcttatgtggccccttactatcatcttaactattttcaattgcgtgtatgcgttgaataatgtgtatcttggcttttctatagttttcactatagtggccattatcatgtggattgtgtattttgtgaatagtatcaggttgtttattagaactggaagttggtggagtttcaacccagaaacaaacaacttgatgtgtatagatatgaagggaaggatgtatgttaggccgataattgaggactaccatacccttacggtcacaataatacgtggtcatctttacatgcaaggtataaaactaggtactggctattctttgtcagatttgccagcttatgtgactgttgctaaggtctcacacctgctcacgtataagcgtggttttcttgacaagataggcgatactagtggttttgctgtttatgttaagtccaaagtcggtaattaccgactgccatcaacccaaaagggttctggcatggacaccgcattgttgagaaataatatctaaactttaaggatgtcttttactcctggtaagcaatccagtagtagagcgtcctttggaaatcgttctggtaatggcatccttaagtgggccgatcagtccgaccaatctagaaatgttcaaaccaggggtagaagagctcaacccaagcaaactgctacttctcagctaccatcaggagggaatgttgtaccctactattcttggttctctggaattactcagtttcaaaaaggaaaggagtttgaatttgcagagggacaaggtgtgcctattgcaccaggagtcccagctactgaagctaaggggtactggtacagacacaacagacgttcttttaaaacagccgatggcaaccagcgtcaactgctgccacgatggtatttttactatcttggaacaggaccgcatgccaaagaccagtatggcaccgatattgacggagtcttctgggtcgctagtaaccaggctgatgtcaataccccggctgacattctcgatcgggacccaagtagcgatgaggctattccgactaggtttccgcctggcacggtactccctcagggttactatattgaaggctcaggaaggtctgctcctaattccagatctacttcacgcgcatccagtagagcctctagtgcaggatcgcgtagtagagccaattctggcaacagaacccctacctctggtgtaacacctgatatggctgatcaaattgctagtcttgttctggcaaaacttggcaaggatgccactaagccacagcaagtaactaagcagactgccaaagaaatcagacagaaaattttgaataagccccgccagaagaggagccccaataaacaatgcactgttcagcagtgttttgggaagagaggccccaatcagaattttggtggtggagaaatgttaaaacttggaactagtgacccacagttccccattcttgcagaactcgcacccacagctggtgcgtttttctttggatcaagattagagttggccaaagtgcagaatttgtctgggaatcttgacgagccccagaaggatgtttatgaattgcgctataatggtgcaattagatttgacagtacactttcaggttttgagaccataatgaaggtgttgaatgagaatttgaatgcatatcaacaacaagatggtatgatgaatatgagtccaaaaccacagcgtcagcgtggtcagaagaatggacaaggagaaaatgataatataagtgttgcagcgcctaaaagccgtgtgcagcaaaataagagtagagagttgactgcagaggacatcagccttcttaagaagatggatgagccctatactgaagacacctcagaaatataagagaatgaaccttatgtcggcacctggtggtaagccctcgcaggaaagtcgggataaggcactctctatcagaatggatgtcttgctgctataatagatagagaaggttatagcagactatagattaattagttgaaagttttgtgtggtaatgtatagtgttggagaaagtgaaagacttgcggaagtaattgccgaacaagtgcccaagggaagagccagcatgttaagttaccacccagtaattagtaaatgaatgaagttaattatggccaattggaagaatcac

SEQ ID NO: 24 - DNA, 31100 bp, Coronavirus
gattgtgagcgatttgcgtgcgtgcatcccgcttcactgatctcttgttagatctttttataatctaaactttataaaaacatccactccctgtattctatgcttgtgggcgtagatttttcatagtggtgtctatattcatttctgctgttaacagctttcagccagggacgtgttgtatcctaggcagtggcccacccataggtcacaatgtcgaagatcaacaaatacggtctcgaactacactgggctccagaatttccatggatgtttgaggacgcagaggagaagttggataaccctagtagttcagaggtggatatagtatgctccaccactgcgcaaaagctggaaacaggcggaatttgtcctgaaaatcatgtgatggtggattgtcgccgacttcttaaacaagagtgttgtgtgcagtctagcctaatacgtgaaattgttatgaatacacgtccatatgatttggaggtgctacttcaagatgctttgcagtcccgcgaagcagttttggttacaccccctctaggtatgtctctggaggcatgctatgtgagaggttgtaatcctaatggatggaccatgggtttgtttcggcgtagaagtgtgtgtaacactggtcgttgcgctgttaacaagcatgtggcctatcagctatatatgattgatcctgcgggtgtctgttttggtgcaggtcaatttgtgggttgggttatacccttagcctttatgcctgtgcaatcccggaaatttattgctccttgggttatgtacttgcgtaagtgtggcgaaaagggtgcctacattaaagattataaacgtggcggttttgaacacgtttataattttaaagttgaggatgcttacgacctggttcatgatgagcctaagggtaagttttctaagaaggcttatgctttaattagaggataccgtggtgttaaaccgcttctctatgtagaccagtatggttgtgattatactggtggtcttgcagatggcttagaggcttatgctgataagacattgcaagaaatgaaggcattatttcctatttggagccaggaactcccttttgatgtaactgtggcatggcacgttgtgcgtgatccacgttatgttatgagactgcagagtgcttctactatacgtagtgttgcatatgttgctaaccctactgaagacttgtgtgatggttctgttgttataaaggaacctgtgcatgtttatgcggatgactctattattttacgtcaacataatttagttgacattatgagttgtttttatatggaggcagatgcagttgtaaatgctttttatggtgttgatttgaaagattgtggttttgttatgcagtttggttatattgactgcgaacaagacttgtgtgattttaaaggttgggttcctggtaatatgatagatggttttgcttgcactacttgtggtcatgtttatgagacaggtgatttgctagcacaatcttcaggtgttttgcctgttaatcctgtattgcatactaagagtgcagcaggttatggtggttttggttgtaaggattcttttaccctgtatggccaaactgtagtttattttggaggttgtgtgtattggagtccagcacgtaatatatggattcctatattaaaatcttctgttaagtcttatgacggtttggtttatactggagttgtaggttgcaaggctattgtaaaggaaacaaatctcatttgcaaagcgttgtaccttgattatgttcaacacaagtgtggcaatttacaccagcgggagttgctaggtgtgtcagatgtgtggcataaacaattgttattaaatagaggtgtgtacaaacctcttttagagaatattgattattttaatatgcggcgcgctaaatttagtttagaaacttttactgtttgtgcagatggttttatgccttttcttttagatgatttggttccgcgcgcatattatttggcagtaagtggtcaagcattttgtgactacgcaggtaaaatctgccatgctgttgtgtctaagagtaaagagttacttgatgtgtctgtggattctttaggtgcagctatacattatttgaattctaaaattgttgatttggctcaacattttagtgattttggaacaagtttcgtttctaaaattgttcatttctttaagacttttactactagcactgctcttgcatttgcatgggttttatttcatgttttgcatggtgcttatatagtagtggagagtgatatatattttggtaaaaacattcctcgttatgctagtgctgttgcacaagcatttcggagtggtgctaaagttggactggactctttaagagttacttttattgatggcctttcttgttttaagattggacgtagaagaatttgtctttcaggcagtaaaatttatgaagttgagcgtggcttgttacattcatctcaattgccattagatgtttatgatttaaccatgcctagtcaagttcagaaaaccaagcaaaaaggtatttatttaaaaggttctggttctgatttttcattagcggatagtgtagttgaagttgttacaacttcacttacaccatgtggttattctgaaccacctaaagttgcagataaaatttgcattgtggataatgtttatatggccaaggctggtgacaaatattaccctgttgtggttgatggtcatgttggacttttggatcaagcatggagggttccttgtgctggaaggtgtgttacatttaaggaacagcctacagtaaatgagattgcaagcacgcctaagactattaaagttttttatgagcttgacaaagattttaatactattttaaacactgcatgtggagagtttgaagtggatgatactgtggatatggaggaattttatgctgtggtgattgatgccatagaagagaaactttctccatgtaaggagcttgaaggtgtaggtgctaaagttagtgcctttttacagaaattagaggataattccctatttttatttgatgaggctggtgaggaagttcttgctcctaaattgtattgtgcttttacagctcctgaagatgatgactttcttgaagaaagtggtgttgaagaagatgatgtagaaggtgaggaaactgatttaactgtcacaagtgctggagagccttgtgttgccagtgaacaggaggagtcttctgaaatcttagaggacactttggatgatggtccatgtgtggagacatctgattcacaagttgaagaagatgtacaaatgtcggattttggtgatcttgaatctgtgattcaggattatgaaaatgtttgttttgagttttatactacagaaccagaatttgttaaagttttggatctgtatgttcctaaagcaactcgcaacaattgctggttgcgatcagttttggcagtgatgcagaaactgccctgtcaatttaaagataaaaatttgcaggatctttgggtgttatataagcaacagtatagtcagttgtttgttgataccttggttaataagatacctgctaatattgtagttccacaaggtggttatgttgctgattttgcatattggttcttaaccttatgtgattggcagtgtgttgcatactggaaatgcattaaatgtgatttagctcttaagcttaaaggcttggatgctatgttcttttatggtgatgttgtctcacatgtgtgcaagtgtggtgagtctatggtacttattgatgttgatgtgccatttacagcccactttgctcttaaagataagttgttttgtgcatttattactaagcgtagtgtgtataaagcagcttgtgttgtggatgttaatgatagtcattctatggctgttgttgatggtaaacaaattgatgatcatcgtatcactagtattactagtgataagtttgattttattattgggcatggtacgtcattttcaatgactacttttgaaattgcccaattgtatggttcttgtataacacctaatgtatgttttgttaaaggtgatataattaaagtttctaagcgagttaaagcagaagtcgttgtaaatcctgctaatggccatatggcacatggtggtggtgttgcaaaggctattgcagtagcagctggacagcagtttgttaaagagaccaccgatatggttaagtctaaaggagtttgtgctactggagattgttatgtctctacagggggcaaattatgtaaaactgtgcttaatgttgttggacctgatgcgaggacacagggtaaacaaagttatgcattgttagagcgtgtttataaacatcttaacaaatatgattgtgttgttacaactttgatctcagctggtatatttagtgtgccttctgatgtgtctttaacatatctacttggtactgctaagaaacaagttgttcttgttagcaataatcaagaggattttgatcttatttctaagtgtcagataactgccgttgagggcactaagaaattggcagagcgtctttcttttaatgttgggcgttctatcgtttacgaaacagatgctaataagttgattttaagcaatgacgttgcatttgtttcgacatttaatgtcttacaggatgttttatccttaagacatgatatagcacttgatgatgatgcacgaacctttgttcagagcaatgttgatgttgtacctgagggttggcgtgttgtcaataagttttatcaaattaatggtgttagacccgttaagtattttgagtgtcccgggggcatagatatatgcagccaggataaagtttttggttatgtacagcagggtagttttaataaggctactgttgctcaaattaaagccttgtttttggataaagtggacatcttgctaactgttgatggtgttaatttcactaacaggtttgtgcctgtaggtgaaagttttggtaagagtctaggaaatgtgttttgtgatggagttaatgtcacgaaacataagtgtgatataaattataaaggtaaagtctttttccagtttgataatctttctagtgaagatttaaaggctgtaagaagttcttttaattttgatcagaaggaattgcttgcctactacaacatgcttgttaattgttctaagtggcaggttgtttttaatggtaagtatttcacttttaagcaagctaataacaattgttttgttaatgtttcttgcttaatgctccagagtttgaatctgaaatttaaaattgttcaatggcaggaggcgtggcttgaatttcgttctggccgccctgctagatttgtatcgttggttttggctaaaggtggttttaaatttggggatcctgctgattctagagatttcttgcgtgttgtgtttagtcaagttgatttgacaggggcaatatgtgattttgaaattgcatgtaaatgtggtgtaaagcaggaacagcgtactggtgtggacgctgttatgcattttggtacattgagtcgtgaagatcttgagattggttacaccgtggattgttcttgcggtaaaaagctaattcattgtgtacgatttgatgtaccatttttaatttgcagtaatacacctgctagtgtaaaattacctaagggtgtaggaagtgcaaatatttttaaaggtgataaggttggtcattatgttcatgttaagtgtgaacagtcttatcagctttatgatgcttctaatgttaagaaggttacagacgttactggcaatttgtcagattgtttgtatcttaaaaatttgaaacaaacttttaaatcggtgttaaccacctattatttggatgatgttaagaaaattgagtataaacctgacttgtcacaatattattgtgacggaggtaagtattatactcagcgtattattaaagcccaatttaaaacatttgagaaagtagatggtgtgtatactaattttaaattgataggacacaccgtctgtgatattcttaatgctaagttgggttttgatagctctaaagagtttgttgaatataaggttactgagtggccaacagctacaggtgatgtggtgttggctactgatgatttgtatgttaagagatatgaaaggggttgtattacttttggtaaacctgttatatggttaagccatgagcaagcttccctcaattctttaacatattttaatagacctttattggttgatgagaataaatttgatgttttaaaagtggatgatgttgacgatggtggtgatatctcagagagtgatgctaaagaacccaaagaaatcaacattattaagttaagtggtgttaaaaaaccatttaaggttgaagatagtgtcattgttaatgatgatactagtgaaatcaaatatgttaagagtttgtctatagttgatgtgtatgatatgtggcttacaggttgtaggtgtgttgttaggactgctaatgctttgagcagagcagttaacgtacctacaatacgtaagtttataaaatttggtatgactcttgttagtataccaattgatttgttaaatttaagagagattaagcctgtttttaatgtggttaaagctgtgcgaaataaaatttctgcatgctttaattttattaaatggctttttgtcttattatttggctggattaaaatatccgctgataataaagtaatttacaccacagaagttgcatcaaagcttacgtgtaagcttgtagctttagcttttaaaaatgcatttttgacatttaagtggagtgtggttgctagaggtgcttgcattatagcgactatatttctattgtggtttaattttatatatgccaatgtaatttttagtgatttttatttgcctaaaatcggtttcttgccgacttttgttggtaagatcgtacagtggattaagaacacttttagtcttgtaactatttgtgatctatattccattcaggatgtgggttttaagaatcagtattgtaatggaagtatcgcatgtcagttctgcttggcaggatttgatatgttagataattataaagccattgatgtagtacagtatgaagctgataggagagcatttgttgattatacaggtgtgttaaagattgtcattgaattgatagttagttacgccctgtatacggcatggttttacccattgtttgctcttattagtattcagatcttgaccacttggctgcctgagcttcttatgcttagtacattacattggagtgttaggttgctggtgtctttagctaatatgttaccagcacatgtgtttatgaggttttatattattattgcctcttttattaagctgtttagcttgtttaggcatgttgcctatggttgtagtaaatctggttgtttgttttgttacaagaggaatcgtagtctacgtgttaaatgtagtactattgttggtggcatgatacgctattacgatgttatggctaatggtggcactggcttttgttcaaaacatcaatggaattgcattgattgtgattcttataaaccaggtaatacttttattactgttgaggccgctcttgatttatctaaggaattgaaacggcctattcagcctacagatgttgcttatcatacggttacggatgttaagcaagttggttgttatatgcgcttgttctatgatcgtgatggacagcgcacatatgatgatgttaatgctagtttgtttgtggattatagtaatttgctacattctaaggttaagagtgtgcctaatatgcatgttgtggtagtggaaaatgatgccgataaagctaattttctaaatgctgctgtattttatgcacagtctttgtttagacctattttaatggttgataaaatcttgataactactgctaatactggtacgtctgttacagaaactatgtttgatgtttatgtggatacatttttgtctatgtttgatgtggataaaaagagtcttaatgctttaatagcaactgcgcattcttctataaaacagggtacgcagatctgtaaagttttggatacctttttaagctgtgctcgtaaaagttgttctattgattcagatgttgatactaagtgtttagctgattctgtcatgtctgctgtatcggcaggccttgaattgacggatgaaagttgtaataacttggtgccaacatatttgaagggtgataacattgtggcagctgatttaggtgttctgattcaaaattctgctaagcatgtgcagggtaatgttgctaaaatagccggtgtttcctgtatatggtctgtggatgcttttaatcagcttagttctgatttccagcataaattgaagaaagcatgttgtaaaactggtttgaaacttgagcttacttataataagcagatggctaatgtctctgttttaactacaccctttagtcttaaagggggtgcagtttttagttattttgtttatgtatgttttgtgttgagtttggtttgttttattggattgtggtgcttaatgcccacttacacagtacacaaatcagattttcagcttcccgtttatgccagttataaagttttagataatggtgttattagagatgttagcgttgaagatgtttgtttcgctaacaaatttgaacaatttgatcaatggtatgagtctacatttggtctaagttattatagtaacagtatggcttgtcccattgttgttgctgtagtagaccaggattttggctctactgtgtttaatgtccctaccaaagtgttacgatatggttaccatgtgttgcactttattacacatgcactttctgctgatggagtgcagtgttatacgccacatagtcaaatatcgtattctaatttttatgctagtggctgtgtgctttcctctgcttgcactatgtttgcaatggccgatggtagtccacaaccttattgttatacagatgggcttatgcagaatgcttctctgtatagttcattggtacctcatgtgcggtataatcttgctaatgctaaaggttttatccgtcttccagaagtgttgcgagaaggacttgtgcgtattgtgcgtactcgttctatgtcgtattgcagagttggattatgtgaggaagctgatgagggtatatgctttaattttaatggttcttgggtgcttaataatgattattatagatcattgcctgggaccttttgtggtagagatgtttttgacttaatttatcagctgtttaaaggtttagcacagcctgtggatttcttggcattgactgctagttccattgctggtgctatacttgctgtaattgttgttttgggtttttattacttaataaagcttaaacgtgcttttggtgattacaccagtattgtttttgttaatgtgattgtgtggtgtgtaaattttatgatgctttttgtgtttcaagtttaccctacactttcttgtgtatatgctatttgttatttttatgccacgctttatttcccttcggagataagtgtgataatgcatttacaatggctagttatgtatggcactattatgcctttatggttttgtttgctatatatatctgttgttgtttcaaatcatgctttttgggtattttcttactgcagacagcttggtacttctgttcgtagtgatggtacatttgaagaaatggctcttactacttttatgattacaaaagattcttattgtaagcttaagaattctttgtctgatgttgcttttaatagatatttgagtttgtataataaatataggtattacagcggtaaaatggatactgctgcatatagggaggctgcttgttctcagttggctaaagcaatggatacatttaccaataataatggtagtgatgtgctttaccaaccgcctactgcttccgtttcaacttcattcttgcaatctggtattgtgaaaatggttaatcctacttctaaggtagaaccatgtattgtcagtgttacctatggtaatatgacattgaatggtttatggttggatgataaggtctactgtcccagacatgtgatatgttctgcttcagatatgactaatccagattatacaaatttgttgtgtagagtaacatcaagtgattttactgtattgtttgatcgtctaagccttacagtgatgtcttatcaaatgcagggttgtatgcttgttcttacagtgaccctgcaaaattctcgtacgccaaaatatacatttggtgtggttaaacctggtgagacttttactgttttagctgcttataacggcaaaccacaaggagcctttcatgtgactatgcgtagtagttataccattaagggttcctttttatgcggatcttgtggatctgttggttatgtaataatgggtgattgtgttaaatttgtgtatatgcatcaattggagcttagtactggttgtcatactggtactgatttcaatggggatttttatggtccttataaggatgctcaggttgtccaattgcccgttcaggattatatacaatctgttaattttgtagcatggctttatgctgctatacttaataattgtaattggtttgtacaaagtgataagtgttctgttgaagattttaatgtgtgggctttgtctaatgggtttagccaagttaagtctgatcttgttatagatgctttagcttctatgactggtgtgtctttggaaacactattggctgctattaagcgtcttaagaatggttttcaaggacgtcagattatgggtagttgctcctttgaggatgaattgacacctagcgatgtttatcaacaactcgctggtatcaagttacaatcaaagcgtactagattggttaaaggcattgtttgttggattatggcttctacatttttgtttagttgtataattacagcatttgtgaaatggactatgtttatgtatgtaactactaatatgcttagtattacgttttgtgcactttgtgttataagtttggccatgttgttggttaaacataagcatctttatttgactatgtatataattcctgtgctttttacactgctgtataacaactatttggttgtgtacaagcagacatttagaggctatgtttatgcatggctatcatattatgttccatcagttgagtatacttatactgatgaagtaatttatggcatgttattgcttataggaatggtctttgttacattacgtagcattaaccatgatttgttctcttttataatgtttgttggtcgtgtgatttctgttgtctctttgtggtacatgggttctaacttagaggaagaaattcttcttatgttggcttctctttttggtacttacacatggacaacagctttatctatggctgcagcaaaggttattgctaagtgggttgctgtgaatgttttgtatttcacagatatacctcaaattaagatagtgcttgtatgctatttgtttataggttatattattagctgttattggggtttgttttccttgatgaacagtttgtttagaatgcctttgggtgtttataattataaaatttcagtacaggaattaagatatatgaatgctaatggattgcgccctcctaagaatagttttgaagcccttatgcttaattttaagcttttgggtattggaggtgtgccaattattgaagtatctcaatttcaatcaaaattgactgatgttaaatgtgccaatggtggcttgcttaattgcttgcaacatttgcatgttgcttctaactctaagttgtggcaatattgtagcactttgcacaatgaaatacttgccacttctgatctgggtgttgcttttgaaaagcttgctcagttgttaattgttttgtttgctaatccagctgctgtggatagcaagtgcctgactagtattgaagaagtttgcgacgattacgcaaaggacaatactgttttgcaggctttacagagtgaatttgttaatatggctagcttcgttgaatatgaagttgctaagaaaaatcttgatgaggcgtgttctagtggttctgctaatcaacagcagttaaaacagctagagaaagcctgtaatattgctaaatctgcttatgaacgcgaccgtgctgtagcaagaaagttggagcgtatggcagatttggctctcactaatatgtataaagaagctagaattaatgataagaagagtaaggttgtttctgccttgcaaactatgctttttagtatggtgcgtaagttagataatcaagctctgaattcaatattagataatgctgtgaagggttgtgtaccattgaatgcaatcccttcattggcagcaaatactctgactataattgtaccagataaaagtgtttatgatcaggtagttgacaatgtctatgttacctatgcgggtaatgtatggcagattcaaactatccaagattcagatggtacaaataagcagttgcatgagatatctgatgattgtaactggccactagttattattgcaaatcggcataatgaggtatctgctaccgttttgcaaaataatgaattaatgcctgctaagttgaaaactcaggttgttaatagtggtccagatcagacttgtaatacacctactcaatgttactataataatagttacaatgggaagattgtttatgctatacttagtgatgttgatggtcttaagtatacaaaaattcttaaagatgatggcaattttgttgttttggagttagatcctccttgtaaatttactgttcaagatgttaaaggtcttaaaattaagtacctttattttgtaaaaggttgtaacacactagcaagaggctgggttgttggtacaatttcttctacagttagattgcaagctggaactgctactgagtatgcttccaactcatctatattatctttatgtgcgttttctgtagatcctaagaaaacgtatttagattttatacaacagggaggaacacctattgccaattgtgttaaaatgttgtgtgaccatgctggtaccggtatggccattactgttaaacccgatgctaccactagtcaggattcatatggtggtgcgtctgtttgtatatattgccgcgcacgagttgaacacccagatgttgatgggttgtgcaaattacgcggcaagtttgtacaagtgcctgtaggtataaaagatcctgtgtcttatgttttgacacatgatgtttgtcaagtttgtggattttggcgggatggaagctgttcatgtgttagcactgacactactgttcagtcaaaagatactaattttttaaacgggttcggggtacgagtgtagatgcccgtctcgtaccctgtgccagtggtttatctactgatgtacaattaagggcatttgatatttgcaatgctagtgttgctggcattggtttacatttaaaagttaattgctgccgttttcagcgtgttgatgagaacggtgataaattagatcagttctttgttgttaagaggacagatctgactatatataatagagagatggaatgctatgagcgtgtaaaagattgtaagtttgtggctgaacacgatttctttacatttgatgtagaaggtagtcgtgtgccacacattgtacgcaaggatttaacaaagtatactatgttggatctttgctatgcattgcgacattttgatcgcaatgattgcatgctgctttgtgacattctctctatatatgctggttgtgaacaatcctactttactaagaaggattggtatgattttgttgaaaatcctgatattattaatgtttataaaaagctaggacctatttttaatagagccctagttagcgctactgagtttgcagacaaattggtggaggtaggcttagtaggcattttaacacttgataaccaagatttaaatggtaaatggtatgattttggtgactatgttattgcagccccagggtgtggtgttgctatagcagactcttattattcttatatgatgcctatgctgaccatgtgtcatgcattggattgtgaattgtatgtgaataatgcttatagactatttgatcttgtacagtatgattttactgattacaagctcgaattgtttaataagtattttaagcactggagtatgccataccatcctaacacggttgattgtcaggatgatcggtgtatcatacattgtgctaattttaacatactttttagtatggttttacctaatacatgttttgggcctcttgttaggcaaatttttgtggatggtgtgccttttgttgtttcaattggctaccattataaagaacttggtattgtgatgaacatggatgtggatacacatcgttatcgcttgtctttaaaagacttgcttttatatgctgctgatccagctttgcatgtagcttctgctagtgcattgtatgatttacgcacttgctgttttagtgttgcggctataacaagcggtgtaaaatttcaaacagttaaacctggtaattttaatcaggatttttatgattttattttaagtaagggcctgcttaaagagggtagttcagttgatctgaagcactttttctttacgcaggatggtaatgctgctattactgattataattattataagtacaatttgcccaccatggtggacattaagcagttgttgtttgttttggaagttgtttataagtattttgagatttatgatggtgggtgtataccggcagcacaagtcattgttaataattatgataagagtgctggctatccatttaataaatttggaaaagccaggctctattatgaagcattatcatttgaggagcaggatgaaatttacgcctatactaagcgcaatgtcctgccaacacttactcaaatgaatttgaaatatgctattagtgctaagaatagagcccgcactgttgctggtgtttccatacttagtactatgactggcagaatgtttcatcaaaaatgtttgaaaagtatagcagctacacgtggtgttcctgttgttataggcaccactaagttttatggcggctgggatgatatgttacgtcgccttattaaagatgttgataatcctgtacttatgggttgggattatcctaagtgtgatcgtgctatgccaaacatactacgtattgttagtagtctggtcttggcccgaaaacatgaggcatgttgttcgcaaagcgataggttttatcgacttgcgaatgaatgcgcacaagttctgagtgaaattgttatgtgtggtggctgttattatgttaagcctggtggcactagtagtggtgatgcaactactgcttttgctaattcagtttttaacatatgtcaagctgtttcagccaatgtatgtgctttaatgtcatgcaatggtaataagattgaagatttgagtatacgtgctcttcagaagcgcttatactcacatgtgtatagaagtgatatggttgattcaacctttgtcacagaatattatgaatttttaaataagcattttagtatgatgattttgagtgatgatggcgttgtgtgttataattctgattatgcgtccaaagggtatattgctaatataagtgcctttcaacaggtattgtattatcaaaataacgtttttatgtcagaatccaaatgttgggttgaaaatgacataaacaatggacctcatgaattctgttcacaacatacaatgcttgtaaagatggatggggacgatgtctatcttccatatcctgtacctagtcgtatattaggagctggatgttttgtagatgatttgttaaagactgatagtgttcttttaatagaacgatttgtaagtcttgcaatagatgcttatccacttgtgtaccacgaaaatgaagaataccaaaaggtttttcgtgtttatttggagtatataaagaagttgtacaatgaactgggtaatcagatcttggatagctacagtgttattttaagtacttgtgatggacaaaagtttactgatgagtccttttacaagaacatgtatttaagaagtgcagttatgcagagtgttggagcttgcgtggtctgctcttctcaaacatcattacgttgtggcagttgcatcagaaagcctcttctttgctgcaagtgttgttacgatcatgttatggcaactgatcataaatatgttttgagtgtttcaccatatgtgtgtaacgcaccaggatgtgatgtaaatgatgttaccaaattgtatctaggtggtatgtcatattattgtgaagatcataagccacaatattcgtttaagttggtaatgaatggtatggtttttggtctatataaacaatcttgtacaggatctccgtacatagatgattttaatcgtatagctagttgtaaatggactgatgttgatgattacatactggctaatgaatgtacagagcgcttgaaattgtttgctgcagaaacgcaaaaggcgactgaggaagcctttaagcagagttatgcatcagcaacaatacaagagattgttagtgagcgcgaattgattctctcttgggagattggaaaagtgaagccaccacttaataaaaattatgtttttactggctaccattttactaaaaatggcaagacagttttaggtgagtatgtttttgataagagtgagttgactaatggtgtgtattatcgcgccacaaccacttataagctatctgtaggagatgtttttgttttaacctctcattcagtagctaatttaagtgctcctacgcttgtgccgcaggagaattatagtagtattagatttgctagtgtttatagtgtgcttgagacatttcagaacaatgttgtgaactatcaacacattggtatgaaacgttattgcaccgtgcaaggacctcctggtacaggaaagtcacatcttgctattggtcttgctgtatattattgtacagcacgtgtagtatacactgcggccagccatgcagctgttgacgcattgtgtgaaaaagcatacaaatttttgaatataaatgattgcactcgtattgttcctgccaaggtcagggtggagtgctatgataagtttaaaattaatgacaccactcgtaagtatgtgtttactactataaatgcattacctgagatggtgactgatattgttgttgtagatgaagttagtatgcttaccaattatgagctttctgttattaatgctcgtattcgcgctaagcattatgtttatattggtgatcctgctcaattgccagcaccacgtgtgttattgagcaagggtacacttgaacctaaatattttaacactgttactaagcttatgtgttgcttagggccagacatttttcttggtacatgttatagatgtcctaaggaaatcgttgatacagtgtctgccttggtttatgaaaataagcttaaggctaagaatgaaagtagttcattgtgttttaaggtctattacaaaggcgttacaacacatgaaagttctagtgctgtaaatatgcagcagatttatttgattaataagtttttgaaggctaaccctttgtggcataaagccgtttttattagcccatataatagtcagaactttgcagctaagcgcgttttgggtttgcaaacccaaaccgtggattctgcgcaaggttctgaatatgattatgttatatattcacagactgcagaaacagcgcattctgtaaatgttaatcgcttcaatgttgctattactcgagccaagaaaggtattctttgcgttatgagtaatatgcagttgtttgaagcattacagtttactacattgaccgtagataaagtgccacaggccgttgaaacgagagttcaatgtagtaccaatttatttaaagattgtagcaagagttatagtggttaccacccagctcatgctccttcatttttggcagtagatgacaaatataaggcaactggcgatttagccgtgtgtcttggtattggagattctgctgttacatattcaagattaatatcactcatgggttttaaactggatgttacccttgatgggtattgtaagctttttataactaaagaagaagctgttaaacgcgtgcgtgcttgggttggctttgatgctgaaggtgctcatgccacgcgtgatagcattgggacaaatttcccacttcaattagggttttccacaggaattgattttgttgtggaagccactggtttgtttgctgatagagatggttacagctttaaaaaggctgtggctaaagctcctcctggtgaacaatttaagcatctcatccctttgatgacgagaggtcagcgctgggatgttgttagacctagaatagtacaaatgtttgcagatcatttaattgatctgtctgattgtgttgtgctagttacatgggcagccaactttgagctcacttgtctccgctactttgcaaaagtaggtcgtgagatctcttgtaatgtgtcgactaaacgtgccacagcttacaattctagaactggttactatggttgttggcgccatagtgttacatgtgattacttgtataatccacttattgttgatattcaacagtggggatatattggttctttatcaagtaatcatgatttatattgtagtgtccataaaggagcacatgttgcctcctctgatgctataatgacacggtgtttggccgtttatgattgtttttgcaataatattaattggaatgtggagtatcccatcatttcaaatgagttaagtattaatacctcttgtagggtcttgcagcgtgttatgcttaaagctgccatgctctgcaacagatatactttgtgttatgatattggcaatccaaaagcgattgcctgtgtcaaagattttgattttaagttctatgatgcccaaccaattgttaagtctgtcaagactcttttgtatttttttgaggcacataaggactcttttaaagatggtttgtgtatgttttggaactgtaatgtggataagtatccaccgaatgcagttgtatgtagatttgacacgagagtgttgaataacttaaatcttcctggctgtaatggaggtagtttgtatgttaacaaacatgcattccacactaaacccttttctagggcagcctttgagcatttgaagcctatgccatttttctattattcagatacgccttgcgtgtatatggatggcatggatgctaagcaggttgattatgtacctttgaaatccgccacttgcatcacaagatgcaatttaggtggtgcagtttgtttaaaacatgctgaagagtatcgtgagtacctagagtcttacaatacagctactacagcaggttttactttttgggtctataagacatttgatttttataatttgtggaatacgttcaccaagctacaaagcttggagaatgttgtatataatttagtcaagactggtcattatacaggacaggctggtgaaatgccttgtgcaattataaatgataaagttgtggctaagatcgataaggaggatgttgtcatttttattaataatacaacatatcctactaatgtggctgttgaattatttgccaagcgcagtattcgacaccatccagagcttaagctctttagaaatttgaatatagacgtgtgctggaagcacgtcatttgggattatgctagagaaagtatattttgcagtaatacctatggtgtctgcatgtatacagatttaaagctcattgataaattgaatgtcctttttgatggtcgtgataatggtgctcttgaagcttttaaacgctctaataatggcgtttacatttccacgacaaaagttaagagtctttcgatgataagaggtccaccgcgtgctgaattaaatggcgtagtggtggacaaggttggagacacagattgtgtgttttattttgctgtgcgtaaagagggtcaggatgtcatcttcagccaattcgacagcctgagagtcagctctaaccagagcccacaaggtaatctggggagtaatgaacccggtaatgtcggtggtaatgatgctctggcaacctccactatctttacacaaagccgtgttattagctcttttacatgtcgtactgatatggaaaaagattttatagctttagatcaagatgtgtttattcagaagtatggtttggaggactatgcctttgaacacattgtttatggtaatttcaaccagaagattattggtggtttgcatttgttaataggcttgtaccgaagacagcaaacttccaatctggttattcaggagtttgtttcatacgactccagcatacactcttattttatcactgatgagaagagtggtggtagtaagagtgtttgcactgttatagatattttgttggatgattttgtggctcttgtcaagtcacttaatcttaactgtgtgagtaaggttgttaatgttaatgttgattttaaagattttcagttcatgctttggtgtaacgatgagaaagttatgactttctatcctcgtttgcaagctgcatctgactggaagcctggttattctatgcctgtattatataagtatttgaattccccaatggaaagagttagtctctggaattatgggaagccagttactttgcctacaggctgtatgatgaatgttgctaagtatactcagttatgtcaatatctgaatactacaacattagctgtacctgttaatacgcgagttttgcatttaggtgcaggttcagaaaaaggagtagcaccgggttctgcagttcttaggcagtggttgcctgctggtactattcttaggcagtggttgcctgctggtactattcttgtacataatgatttatacccatttgtgagtgacagtgtcgctacatattttggggattgtataaccttaccctttgattgtcaatgggatttgataatctctgatatgtatgacctattactagacataggagtacatgtagtaagatgttcttacatacattgtcatatgattcgcgacaagttagctctgggtggcagtgttgctataaaaataacagagttttcttggaatgcagaattatataagttaatggggtattttgcattttggacggttttctgcacaaatgcaaatgcttcttctagtgaagggtttttaattggcataaattatttgggtaagcccaaggttgagatagatggaaatgttatgcatgcaattatttgttttggagaaattccacagtttggaacgggggtgcttatagcctgtttgatatggctaaattcccgcttaagttggctggtaatgccgtaataaatttaagagcagaccagattaatgatatggtttattcccttcttgaaaagggtaaactacttgttagagatacaaataaagaagtttttgttggtgacagtatggttaatgtaatctaaactttaagaatggcagttgcttatgcagacaagcctaatcactttattaattttccacttacccagtttgagggttttgtgttaaattataaaggtttacaatttcaacttctcgatgaaggagtggattgtaaaatacaaacagcgccgcacattagtcttgctatgctgatattcagcctgaagactatagaagtgttgatgttgctattcaagaaggttattgatgacatgcattggggtgagggctttcagattaaatttgataacccccatatcctaggaagatgcatagttttagatgttaaaggtgtagaagaattgcatgatgatttagttaattacattcgtgataaaggttgtgttgctgaccaatccaggaaatggattggacattgcaccatagcccaactcacggatgctgcactttccattaaggaaaatgttgatttcataaacagcatgcaattcaattataaaatcactatcaacccctcatcaccggctagacttgaaatagttaagcttggtgctgaaaagaaagatggtttttatgaaaccatagttagccactggatgggaagtcgttttgaatataatccacccactgataagctagctatgattatgggttattgttgttcagaagtggtgcgtaaagagctagaagaaggtgatcttcccgagaatgatgatgatgcttggtttaagctatcgtaccattatgaaaacaattcttggttctttcgacatgtctacaggaaagttcttatttccgtaagtcttgtaaatttagattgtaattgtttggggttttatgaatctccagttgaagaagactaaactcagtgaaaatgtttttgcttcttagatttgttctagttagctgcataattggtagcctaggttttgataaccctcctaccaatgttgtttcgcatttaaatggagattggtttttatttggtgacagtcgttcagattgtaatcatgttgttaataccaacccccgtaattattcttatatggaccttaatcctgccctgtgtgattctggtaaaatatcatctaaagctggcaactccatttttaggagttttcactttaccgatttttataattacacaggcgaaggtcaacaaattattttttatgagggtcttaattttacgccttatcatgcctttaaatgcaccacttctggtagtaatgatatttggatgcagaataaaggcttgttttacactcaggtttataagaatatggctgtgtatcgcagccttacttttgttaatgtaccatatgtttataatggctctgcacaatctacagctctttgtaaatctggtagtttagttcttaataaccctgcatatatagctcgtgaagctaattttggggattattattataaggttgaagctgacttttatttgtcaggttgtgacgagtatatcgtaccactttgtatttttaacggcaagtttttgtcgaatacaaagtattatgatgatagtcaatattattttaataaagacactggtgttatttatggtctcaattctactgaaaccattaccactggttttgattttaattgtcattatttagttttaccctctggtaattatttagccatttcaaatgagctattgttaactgttcctacgaaagcaatctgtcttaacaagcgtaaggattttacgcctgtacaggttgttgattcacggtggaacaatgccaggcagtctgataacatgacggcggttgcttgtcaacccccgtactgttattttcgtaattctactaccaactatgttggtgtttatgatatcaatcatggggatgctggttttactagcatactcagtggtttgttatatgattcaccttgtttttcgcagcaaggtgtttttaggtatgataatgttagcagtgtctggcctctctattcctatggcagatgccctactgctgctgatattaatacccctgatgtacctatttgtgtgtatgatccgctaccacttattttgcttggcatccttttgggtgttgcggtcataattattgtagttttgttgttatattttatggtggataatggtactaggctgcatgatgcttagaccataatctaaacatgtttttgatacttttaatttccttaccaatggcttttgctgttataggagatttaaagtgtactacggtttccattaatgatgttgacaccggtgctccctctattagcactgatattgtcgatgttactaatggtttaggtacttattatgttttagatcgtgtgtatttaaatactacgttgttgcttaatggttactaccctacttcaggttctacatatcgtaatatggcactgaagggaactttactattgagcagactatggtttaaaccaccttttctttctgattttattaatggtatttttgctaaggtcaaaaataccaaggttattaaaaagggtgtaatgtatagtgagtttcctgctataactataggtagtacttttgtaaatacatcctatagtgtggtagtacaaccacatactaccaatttggataataaattacaaggtctcttagagatctctgtttgccagtatactatgtgcgagtacccacatacgatttgtcatcctaagctgggtaataaacgcgtagaactatggcattgggatacaggtgttgtttcctgtttatataagcgtaatttcacatatgatgtgaatgctgattacttgtatttccatttttatcaagaaggtggtactttttatgcatattttacagacactggtgttgttactaagtttctgtttaatgtttatttaggcacggtgctttcacattattatgtcctgcctttgacttgttctagtgctatgactttagaatattgggttacacctctcacttctaaacaatatttactagctttcaatcaagatggtgttatttttaatgctgttgattgtaagagtgattttatgagtgagattaagtgtaaaacactatctatagcaccatctactggtgtttatgaattaaacggttacactgttcagccaattgcagatgtttaccgacgtatacctaatcttcccgattgtaatatagaggcttggcttaatgataagtcggtgccctctccattaaattgggaacgtaagaccttttcaaattgtaattttaatatgagcagcctgatgtcttttattcaggcagactcatttacttgtaataatattgatgctgctaagatatatggtatgtgtttttccagcataactatagataagtttgctatacccaatggtaggaaggttgacctacaattgggcaatttgggctatttgcagtcttttaactatagaattgatactactgctacaagttgtcagttgtattataatttacctgctgctaatgtttctgttagcaggtttaatccttctacttggaataggagatttggttttacagaacaatttgtttttaagcctcaacctgtaggtgtttttactcatcatgatgttgtttatgcacaacattgttttaaagctcccaaaaatttctgtccgtgtaaattggatgggtctttgtgtgtaggtaatggtcctggtatagatgctggttataaaaatagtggtataggcacttgtcctgcaggtactaattatttaacttgccataatgctgcccaatgtgattgtttgtgcactcccgaccccattacatctaaatctacagggccttacaagtgcccccaaactaaatacttagttggcataggtgagcactgttcgggtcttgctattaaaagtgattattgtggaggtaatccttgtacttgccaaccacaagcatttttgggttggtctgttgactcttgtttacaaggggataggtgtaatatttttgctaattttatttttcatgatgttaatagtggtactacttgttctactgatttacaaaaatcaaacacagacataattcttggtgtttgtgttaattatgatctttatggtattacaggccaaggtatttttgttgaggttaatgcgacttattataatagttggcagaaccttttatatgattctaatggtaatctctatggttttagagactacttaacaaacagaacttttatgattcgtagttgctatagcggtcgtgtttcagcggcctttcatgctaactcttccgaaccagcattgctatttcggaatattaaatgcaattacgtttttaataatactctttcacgacagctgcaacctattaactattttgatagttatcttggttgtgttgtcaatgctgataatagtacttctagtgttgttcaaacatgtgatctcacagtaggtagtggttactgtgtggattactctacaaaaagacgaagtcgtagagcgattaccactggttatcggtttactaattttgagccatttactgttaattcagtaaatgatagtttagaacctgtaggtggtttgtatgaaattcaaataccttcagagtttactataggtaatatggaggagtttattcaaacaagctctcctaaagttactattgattgttctgcttttgtctgtggtgattatgcagcatgtaaatcacagttggttgaatatggtagcttctgtgacaatattaatgctatactcacagaagtaaatgaactacttgacactacacagttgcaagtagctaatagtttaatgaatggtgtcactcttagcactaagcttaaagatggcgttaatttcaatgtagacgacatcaatttttcccctgtattaggttgtttaggaagcgcttgtaataaagtttccagcagatctgctatagaggatttacttttttctaaagtaaagttatctgatgtcggtttcgttgaggcttataataattgtactggaggtgccgaaattagggacctcatttgtgtgcaaagttataatggtatcaaagtgttgcctccactgctctcagtaaatcagatcagtggatacactttggctgccacctctgctagtctgtttcctcctttgtcagcagcagtaggtgtaccattttatttaaatgttcagtatcgtattaatgggattggtgttaccatggatgtgttaagtcaaaatcaaaagcttattgctaatgcatttaacaatgctcttgatgctattcaggaagggtttgatgctaccaattctgctttagttaaaattcaagctgttgttaatgcaaatgctgaagctcttaataacttattgcaacaactctctaatagatttggtgctataagttcttctttacaagaaattctatctagactggatgctcttgaagcgcaagctcagatagacagacttattaatgggcgtcttaccgctcttaatgtttatgtttctcaacagcttagtgattctacactagtaaaatttagtgcagcacaagctatggagaaggttaatgaatgtgtcaaaagccaatcatctaggataaatttttgtggtaatggtaatcatattatatcattagtgcagaatgctccatatggtttgtattttatccactttagctatgtccctactaagtatgtcactgcgaaggttagtcccggtctgtgcattgctggtgatagaggtatagcccctaagagtggttattttgttaatgtaaataatacttggatgttcactggtagtggttattactaccctgaacccataactggaaataatgttgttgttatgagtacctgtgctgttaactatactaaagcgccggatgtaatgctgaacatttcaacacccaacctccatgattttaaggaagagttggatcaatggtttaaaaaccaaacatcagtggcaccagatttgtcacttgattatataaatgttacattcttggacctacaagatgaaatgaataggttacaggaggcaataaaagttttaaatcagagctacatcaatctcaaggacattggtacatatgagtattatgtaaaatggccttggtatgtatggcttttaattggctttgctggtgtagctatgcttgttttactattcttcatatgctgttgtacaggatgtgggactagttgttttaagatatgtggtggttgttgtgatgattatactggacaccaggagttagtaattaaaacatcacatgacgactaagttcgtctttgatttattggctcctgacgatatattacatcccttcaatcatgtgaagctaattataagacccattgaggtcgagcatattataatagctaccacaatgcctgctgtttagtgggtactgtgtcttatataactagtaaacctgtaatccaatggctacaaccattgacggtacagattatactaatattatgcctagtactgtttctacaagagtttatttaggctgttctataggtattgacactagcaccactggttttacctgtttttcatggtactagttccaaaccatattataatttaggtagaccttataactttaagcattattaattgccaaagtttctaaggtcacgccctagtaatggacatctggagacctgagattaaatatctccgttatactaacggttttaatgtctcagaattagaagatgcttgttttaaatttaactataaatttcctaaagtaggatattgtagagttcctagtcatgtttggtgccgtaatcaaggtagcttttgtgctacactcactctttatggcaaatccaaacattatgataaatattttggagtaataactggttttacagcattcgctaatactgctagaggaggctgttaacaaactggttttcttagctgttactttattacctgcggagacaggagttaaatgtttatggctgatgcttattttgcagacactgtgtggtatgtggggcaaataatttttatagttgccatttgtttattggttataatagttgtagtggcatttttggcaacttttaaattgtgtattcaactttgcggtatgtgtaataccttagtactgtccccttctatttatgtgtttaatagaggtaggcagttttatgagttttacaacgatgtaaaaccaccagttcttgatgtggatgacgtttagttaatccaaacattatgagtagtgtaactacaccagcaccagtttacacctggactgctgatgaagctattaaattcctaaaggaatggaacttttctttgggtattatactactttttattacaatcatattgcaatttggatatacaagtcgcagtatgtttgtttatgttattaagatgatcattttgtggcttatgtggccccttactatcatcttaactattttcaattgcgtgtatgcgttgaataatgtgtatcttggcttttctatagttttcactatagtggccattatcatgtggattgtgtattttgtgaatagtatcaggttgtttattagaactggaagttggtggagtttcaacccagaaacaaacaacttgatgtgtatagatatgaagggaaggatgtatgttaggccgataattgaggactaccatacccttacggtcacaataatacgtggtcatctttacatgcaaggtataaaactaggtactggctattctttgtcagatttgccagcttatgtgactgttgctaaggtctcacacctgctcacgtataagcgtggttttcttgacaagataggcgatactagtggttttgctgtttatgttaagtccaaagtcggtaattaccgactgccatcaacccaaaagggttctggcatggacaccgcattgttgagaaataatatctaaactttaaggatgtcttttactcctggtaagcaatccagtagtagagcgtcctttggaaatcgttctggtaatggcatccttaagtgggccgatcagtccgaccaatctagaaatgttcaaaccaggggtagaagagctcaacccaagcaaactgctacttctcagctaccatcaggagggaatgttgtaccctactattcttggttctctggaattactcagtttcaaaaaggaaaggagtttgaatttgcagagggacaaggtgtgcctattgcaccaggagtcccagctactgaagctaaggggtactggtacagacacaacagacgttcttttaaaacagccgatggcaaccagcgtcaactgctgccacgatggtatttttactatcttggaacaggaccgcatgccaaagaccagtatggcaccgatattgacggagtcttctgggtcgctagtaaccaggctgatgtcaataccccggctgacattctcgatcgggacccaagtagcgatgaggctattccgactaggtttccgcctggcacggtactccctcagggttactatattgaaggctcaggaaggtctgctcctaattccagatctacttcacgcgcatccagtagagcctctagtgcaggatcgcgtagtagagccaattctggcaacagaacccctacctctggtgtaacacctgatatggctgatcaaattgctagtcttgttctggcaaaacttggcaaggatgccactaagccacagcaagtaactaagcagactgccaaagaaatcagacagaaaattttgaataagccccgccagaagaggagccccaataaacaatgcactgttcagcagtgttttgggaagagaggccccaatcagaattttggtggtggagaaatgttaaaacttggaactagtgacccacagttccccattcttgcagaactcgcacccacagctggtgcgtttttctttggatcaagattagagttggccaaagtgcagaatttgtctgggaatcttgacgagccccagaaggatgtttatgaattgcgctataatggtgcaattagatttgacagtacactttcaggttttgagaccataatgaaggtgttgaatgagaatttgaatgcatatcaacaacaagatggtatgatgaatatgagtccaaaaccacagcgtcagcgtggtcagaagaatggacaaggagaaaatgataatataagtgttgcagcgcctaaaagccgtgtgcagcaaaataagagtagagagttgactgcagaggacatcagccttcttaagaagatggatgagccctatactgaagacacctcagaaatataagagaatgaaccttatgtcggcacctggtggtaagccctcgcaggaaagtcgggataaggcactctctatcagaatggatgtcttgctgctataatagatagagaaggttatagcagactatagattaattagttgaaagttttgtgtggtaatgtatagtgttggagaaagtgaaagacttgcggaagtaattgccgacaagtgcccaagggaagagccagcatgttaagttaccacccagtaattagtaaatgaatgaagttaattatggccaattggaagaatcacaaaaaaaaaaaaaaaaaaaaaaaaaaaaaaaaaaaaaaaaaaaaaaaaaaaaaaaaa

SEQ ID NO: 25 - DNA, 922 bp, Coronavirus
atttaataaatttggaaaagccaggctctattatgaagcattatcatttgaggagcaggatgaaatttacgcctatactaagcgcaatgtcctgccaacacttactcaaatgaatttgaaatatgctattagtgctaagaatagagcccgcactgttgctggtgtttccatactcagtactatgactggcagaatgtttcatcaaaaatgtttgaaaagtatagcagctacacgtggtgttcctgttgttataggcaccactaagttttatggcggctgggatgatatgttacgtcgccttattaaagatgttgataatcctgtacttatgggttgggattatcctaagtgtgatcgtgctatgccaaacatactacgtattgttagtagtctggtcttggcccgaaaacatgaggcatgttgttcgcaaagcgataggttttatcgacttgcgaatgaatgcgcacaagttctgagtgaaattgttatgtgtggtggctgttattatgttaagcctggtggcactagtagtggtgatgcaactactgcttttgctaattcagtttttaacatatgtcaagctgtttcagccaatgtatgtgctttaatgtcatgcaatggtaataagattgaagatttgagtatacgtgctcttcagaagcgcttatactcacatgtgtatagaagtgatatggttgattcaacctttgtcacagaatattatgaatttttaaataagcattttagtatgatgattctgagtgatgatggcgttgtgtgttataattctgattatgcgtccaaagggtatattgctaatataagtgcctttcaacaggtattgtattatcaaaataacgtttttatgtcagaatccaaatgttgggttgaaaatgacataaacaatggacctcatgaattc

SEQ ID NO: 26 - DNA, 31028 bp, Coronavirus; identical to SEQ ID NO: 21

SEQ ID NO: 27 - DNA, 922 bp, Coronavirus
tttgaacaaatttggtaaagctagactttactatgaaactctgtcatatgaagagcaggatgcactttttgctttaacaaagagaaatgttctacccacaatgactcagatgaatttgaaatatgctatttctggaaaggctagagctcgtacagtaggaggagtttcacttctttctaccatgactacgagacaataccaccagaagcatttgaagtcaattgctgcaacacgcaatgccactgtggttattggctcaaccaagttttatggtggttgggataacatgcttaaaaatttaatgcgtgatgttgataatggttgtttgatgggatgggactatcctaagtgtgaccgcgctttacctaatatgatcagaatggcatctgccatgatattaggttctaagcatgttggttgttgtacacatagtgatagattctatcgcctctccaatgagttagctcaagtactcacagaagttgtgcattgcacgggtggtttttactttaaacctggtggtacaactagcggtgatggtactacggcttatgctaactcagcttttaacatctttcaagctgtttctgctaatgttaataagcttttgggagtcgattcaaacgcttgtaacaatgttacagtaaaatccatacaacgtaaaatctacgataattgttatcgtagtagcagcattgatgaagaatttgttgttgaatacttcagttatttgagaaaacacttttctatgatgattctatctgatgatggagttgtgtgctacaacaaagattatgcagatctaggttatgtagctgatatcaatgcttttaaagcaacgctctattatcagaataatgtctttatgtccacttctaagtgttgggtagaaccagatcttaatgttggaccacatgaattt

SEQ ID NO: 28 - DNA, 251 bp, Coronavirus
actcagatgaatttgaaatatgctattagtgctaagaatagagcccgcactgttgctggtgtttccatacttagtactatgactggcagaatgtttcatcaaaaatgtttgaaaagtatagcagctacacgtggtgttcctgttgttataggcaccactaaattttatggcggctgggatgatatgttacgtcgccttattaaagatgttgacaatcctgtacttatgggttgggattatcctaagtgtga

SEQ ID NO: 29 - DNA, 922 bp, Coronavirus
tttgaacaaatttggtaaagctagactttactacgaaactctttcatatgaagagcaggatgcactttttgctttaacaaagagaaatgttctacccacaatgactcaaatgaatttgaaatatgctatttctggtaaggcaagagctcgtacagtaggaggagtttcacttctttctaccatgactacgagacaataccatcagaagcatttgaagtcaattgctgcaacacgcaatgccactgttgtcattggttcaaccaagttttatggtggttgggacaacatgcttaaaaatttgatgcgtgatgttgataacggttgtttgatggggtgggactatcctaagtgtgaccgtgctttacctaatatgattagaatggcttctgccatgatattgggttctaagcatgttggttgttgtacacatagtgatagattctaccgcctctccaacgagttagctcaagtactcacagaagttgtgcattgcacaggcggtttttactttaaacctggtggtacaactagtggtgatggtactacagcttacgctaactctgcttttaacatctttcaagctgtttctgctaatgttaataagcttttgggcgttgattcaaacgcttgtaacaatgttacagtaaagtccatacaacgtaaaatctacgataattgttatcgtagtagcagcattgatgaagaatttgttgttgagtactttagttatttgagaaaacacttttctatgatgattttatctgatgatggagttgtgtgctacaacaaagattatgcagatctaggttatgtagctgacattaatgcttttaaagcaacgctctattatcagaataatgtcttcatgtccacttctaagtgttgggtagaaccagatcttagcgttggaccacatgaattt

SEQ ID NO: 30 - DNA, 27317 bp, Coronavirus
acttaagtaccttatctatctacagatagaaaagttgctttttagactttgtgtctacttttctcaactaaacgaaatttttgctatggccggcatctttgatgctggagtcgtagtgtaattgaaatttcatttgggttgcaacagtttggaagcaagtgctgtgtgtcctagtctaagggtttcgtgttccgtcacgagattccattctacaaacgccttactcgaggttccgtctcgtgtttgtgtggaagcaaagttctgtctttgtggaaaccagtaactgttcctaatggcctgcaaccgtgtgacacttgccgtagcaagtgattctgaaatttctgcaaatggctgttctactattgcgcaagccgtccgccgttatagcgaggccgctagcaatggttttagggcatgccgatttgtttcattagatttgcaggattgcatcgttggcattgcagacgatacatatgttatgggtctgcatggcaatcagacgttgttttgcaacataatgaaattttctgaccgtccttttatgcttcatgggtggttggttttttccaattcaaattaccttttggaggaatttgatgttgtcttcggtaagagaggtggtggtaatgtgacatacactgaccagtatctctgtggcgccgatggcaaacctgttatgagtgaagatttatggcagtttgttgaccatttcggtgagaacgaagaaattatcatcaatggtcatacttacgtttgtgcttggcttactaagcgtaagcccttagattacaaacgtcagaacaaccttgccattgaagagattgaatatgtgcatggtgatgctttgcatacactacgcaatggttctgttcttgaaatggctaaggaagtgaagacatctagtaaagttgtgttaagcgatgctcttgacaaactttacaaagtctttggttctcctgttatgacaaatggttccaacatcctagaggcctttactaaacctgtgtttattagtgcattagttcaatgtacttgtggtaccaagtcttggtctgttggtgattggaccggttttaaatcctcttgttgcaacgtgatcagtaataaactgtgtgttgttcccggtaatgttaaacctggtgatgctgtgattaccactcagcaagctggtgctggtattaagtatttttgtggcatgactcttaagtttgttgcaaatattgaaggtgtctctgtttggagagtgattgctcttcagagtgtggattgctttgttgcttcttccacttttgtagaagaggaacatgttaatagaatggatacattctgcttcaatgtacgcaatagtgttactgatgagtgtcgtctggccatgttgggtgctgaaatgactagtaatgtcagaagacaagttgcttcaggtgtcatagacattagtaccggttggtttgatgtttatgatgacatctttgctgaaagcaaaccatggtttgttcgcaaggctgaagacatttttggcccttgttggtccgctcttgcttctgcacttaaacaacttaaagtcactacaggtgaacttgtgagatttgttaagtctatttgcaattcagctgttgctgtcgtgggtggtactatacaaattctcgctagtgtgcctgagaagtttttgaatgcgtttgacgtgtttgtcacagctattcaaactgtctttgactgtgctgttgaaacttgtactattgccggtaaagcatttgacaaggtttttgactatgttttgcttgataatgcgcttgtaaaacttgtcaccacaaagcttaagggtgttcgtgaacgtggccttaataaagttaagtatgcaacagttgttgttggttccactgaagaagttaaatcttcacgtgttgaacgtagcactgctgtacttacaatcgccaacaattattccaaactttttgatgaagggtatactgttgtaattggcgatgtggcgtactttgttagtgacggctacttccgtcttatggccagtccaaatagtgtgttgactactgcagtctataaaccattgtttgcttttaatgtgaatgttatgggtactagacctgaaaaatttccaaccactgtgacttgtgaaaatttagagtctgctgttttgtttgttaatgacaaaattactgaattccaattggattacagtattgatgtcattgataatgaaataattgtcaaacctaatatcagcctatgtgttccactttatgtgagagactatgttgacaaatgggatgatttttgcagacaatatagtaacgagtcttggtttgaggatgattacagggcttttatcagtgttttggacatcactgatgctgctgtgaaagctgcagagtctaaagctttcgttgatactattgttccaccttgcccatctattttgaaagttatagatggaggcaaaatatggaatggtgttattaaaaatgttaactctgttagagactggcttaagtctttgaagttaaatctcacacaacagggtttgcttggaacatgtgcaaagcgttttaaacgttggcttggcattttgctagaggcctataatgcgtttttagacactgtggtttctactgttaaaattggtggcttgacctttaaaacatatgcttttgataaaccttacattgtgatacgtgatatcgtgtgtaaggttgaaaataaaacagaagcagaatggattgagctttttccacataatgacaggattaagtcttttagtactttcgagagtgcttacatgccaattgcagaccctacacattttgacattgaagaagttgaacttttagatgcagagtttgtagaaccaggctgtggtggtattttggcagtaatagatgagcacgtcttttataagaaggatggtgtttattatccatcaaatggtactaacattctacctgttgcatttacaaaagccgctggtggtaaagtttcattttctgatgacgttgaagtaaaagacattgaacctgtttacagagtcaagctttgctttgagtttgaagatgaaaaacttgtagatgtttgtgaaaaggcaattggcaagaaaattaaacatgaaggtgactgggatagcttttgtaagactattcaatcagcactttctgttgtttcttgctatgtaaatctacctacttattacatttatgatgaagaaggcggtaatgacttgagtttgcccgttatgatttctgaatggcctctttctgttcaacaagctcaacaagaagctactttacctgatattgctgaggatgttgttgaccaagttgaagaagtcaatagcatttttgacattgagacagtggatgttaaacatgatgtgagtccttttgaaatgccatttgaagagttaaatggtttaaagatactcaaacaattggataacaactgctgggttaactcagttatgttacaaatacaattaactggtatacttgatggtgactatgctatgcagttttttaaaatgggccgagttgccaagatgattgaacgctgctacactgctgagcaatgtatacgtggtgctatgggtgatgttggtttgtgtatgtatagactgcttaaagacttacacactggttttatggttatggattataaatgtagttgtaccagtggtaggcttgaagaatcgggagctgttttgttttgtacgcccactaagaaggcgtttccttatggtacttgtctaaattgtaacgcacctcgcatgtgtacaattaggcagttacaaggtaccataatatttgtgcaacaaaaaccagaacctgttaatcctgtttcttttgttgttaaaccagtctgctcatcaatttttcgtggtgctgtgtcttgtggtcattaccagactaacatctattcacaaaatttgtgtgtggatggttttggtgttaacaagattcagccctggacaaatgatgcacttaatactatttgtattaaggatgcagattataatgcaaaagttgaaatatctgttacaccaattaaaaatacagttgatacaacacctaaggaagaatttgttgttaaagagaagttgaacgccttcctcgttcatgacaatgtagctttctaccaaggtgatgttgatactgttgttaatggtgttgactttgactttattgtaaatgctgctaatgagaaccttgctcatggtggaggacttgccaaagctttagatgtgtacactaaaggtaaacttcaacgtttatctaaagaacacattggattagcgggtaaagtaaaagttggtacaggagttatggttgagtgtgatagccttagaatttttaatgttgttggtccacgcaagggtaaacatgaacgtgatttactcataaaagcttacaacactattaataatgaacaaggcacacctttaacaccaattttgagctgtggtatttttggtatcaaactcgaaacttcattagaagttttgcttgatgtttgtaatacaaaagaagttaaagtttttgtttatacagacacagaggtttgtaaggttaaggattttgtgtctggtttagtgaatgttcaaaaagttgagcaacctaaaatagaaccaaaaccagtgtccgtaattaaagttgcacccaagccttacagggtagatggtaaatttagttactttacagaagacttgttgtgtgtcgctgatgacaaacccattgttttgtttactgactctatgcttactttggatgaccgtggtttagctctagacaatgcacttagtggtgtgcttagtgctgctattaaggattgtgttgacataaataaagctataccttctggtaatcttattaagtttgatataggttctgttgttgtctacatgtgtgttgtgccatccgaaaaggacaaacatttagataataatgttcaacgatgcacacgtaagttgaatagacttatgtgtgatatagtttgtactataccagctgactacatcttgccattggtgttgtctagtttgacttgtaatgtttcttttgtaggtgaacttaaagctgctgaagctaaagttataactataaaggtgacagaggatggtgttaatgttcatgatgtgaccgtgacaacagacaagtcatttgaacaacaagttggtgttattgctgataaggacaaagatctttctggtgcagtaccaagtgatcttaacacatctgaattgcttactaaagcaatagatgttgattgggtcgaattttatggctttaaagatgctgttacttttgcaacagttgatcatagtgcttttgcctatgaaagtgctgttgttaatggtattagagtgttaaaaactagtgataataattgttgggtgaatgctgtttgtattgcactacagtattcgaaaccccattttatttcacaaggtcttgatgctgcgtggaataaatttgttttaggcgatgttgaaatttttgttgcatttgtttactatgttgcaagactaatgaaaggtgacaagggtgatgctgaagacactttgactaagttgtctaagtatcttgctaatgaagctcaagttcaattagaacattatagttcttgtgttgaatgtgatgctaaatttaaaaactctgttgcatctatcaattctgctatagtttgtgctagtgtcaaacgtgatggtgtgcaagttggttattgtgtccatggtattaagtactattcacgtgttagaagtgttagaggtagagctattatagtcagtgtcgaacagcttgaaccgtgtgctcagtctagacttttgagtggtgttgcttatactgctttttctggacctgttgacaaaggtcattatactgtttatgatactgcaaagaaatcaatgtatgatggtgatcgttttgttaaacatgatctttctctgctgtctgtcacatcagttgttatggttggtggttatgttgcacctgttaatacagtgaaacctaaaccagtcattaatcaacttgatgaaaaggcacagaagttctttgattttggtgattttttgattcataattttgttatttttttcacatggttattgagtatgtttactttgtgtaaaactgcagtaactacaggtgatgttaaaataatggccaaagcaccacaaaggacgggtgttgttttaaaacgtagtcttaaatataacttaaaagcgtcagcagctgttcttaaatctaagtggtggctgcttgctaagtttacgaaactactgttactcatatatacattgtactcagtagttttgctttgtgtacgttttggaccgtttaatttttgtagtgagactgttaatggttatgctaagtcaaactttgtcaaggatgattactgtgatggttcattgggctgcaagatgtgtctttttggttaccaagagttaagtcaatttagccatttggatgttgtgtggaagcatataacagaccctttgtttagtaatatgcaacctttcattgtcatggttttgctgcttatatttggtgacaattatttgagatgcttcttgctgtattttgttgctcagatgataagcacagttggtgtttttctaggttacaaggaaacaaattggttcttgcactttattccatttgatgttatttgtgatgaactgcttgtcactgttattgttattaaggttatttcttttgtcagacatgtgctttttggttgtgaaaacccagattgtattgcgtgttctaagagtgctagacttaagagattccctgttaacacaattgtcaatggtgtgcaacgttcattttatgttaatgcaaatggtggtagtaagttttgtaagaaacatagatttttctgtgttgattgtgactcttatggttatggcagcacgtttataacacccgaagtttctagagaacttggtaacattaccaaaacaaatgtgcaaccaacagggccggcctatgtcatgattgacaaagtggagtttgaaaatggtttttacagattgtattcctgtgaaacattttggcgttacaactttgatataactgaaagcaagtattcttgcaaagaggtttttaaaaattgtaatgttttggatgatttcatcgtgtttaacaataatgggaccaatgtaacgcaggttaaaaatgctagtgtttacttttcacagttgttgtgtaggcccattaaattagttgacagtgaacttttgtccactttgtcagttgattttaatggtgtcttacacaaggcatacattgatgtactacgtaatagctttggtaaagatcttaatgctaatatgtctttagccgagtgcaagagagctttaggcctgtctattagtgatcatgaatttactagtgctatttctaatgcacatcgttgtgacgtgttgttatctgatttgtcatttaacaactttgtcagttcgtatgctaaacctgaggaaaaattatcagcttatgacttggcgtgttgtatgcgtgcaggtgctaaggttgttaatgccaatgttctgacaaaggaccaaactcctattgtttggcatgcaaaggattttaacagtctttctgctgaaggtcgcaagtatattgtaaaaactagcaaagctaagggtttgactttcttgttgacaattaatgaaaaccaagctgtcacgcaaatacctgcaactagcattgttgctaagcaaggtgctggtgatgctggccattcattaacatggctgtggctactgtgtggtcttgtgtgtttgattcaattctacttgtgctttttcatgccctattttatgtacgatatcgtgagtagttttgagggttatgattttaagtatatagaaaatggtcagttgaagaattttgaagcgccacttaaatgcgtcagaaacgtttttgaaaactttgaggactggcattatgctaagtttggcttcacacctttaaacaagcaaagctgtcctattgtagttggagtttctgaaattgttaatactgtcgctggcattccatctaatgtgtatcttgttggtaaaactttaatttttacactacaagctgcttttggtaatgctggtgtttgttatgacatttttggagtcacaacacctgaaaagtgcatttttacttctgcttgtactagattagaaggtttgggtggtaacaatgtttattgttataacacagcgcttatggaaggttctttgccttacagttcaatacaagctaatgcatattataaatatgacaatggcaattttattaagttgccagaagttattgcacaaggctttggttttagaacagtgcgtactattgccaccaaatactgccgcgtaggtgaatgtgttgaatccaatgcaggtgtgtgttttggctttgacaagtggtttgttaacgatggacgtgttgccaatggttacgtttgtggtactggtttgtggaaccttgtatttaacatactttccatgttttcatcttcattctctgttgctgcaatgtcaggtcaaattttacttaattgtgcattaggtgcttttgctattttttgttgttttcttgtgacaaagtttagacgcatgtttggtgacctttctgtaggtgtttgcactgttgttgtggctgttttgcttaacaatgtctcttacattgtaactcagaatttagtaacaatgattgcttatgccatattgtatttctttgctactagaagcttacgctatgcatggatttggtgtgctgcatatttaattgcgtatatttcttttgctccatggtggttgtgtgcttggtactttcttgctatgttgacaggtttgttacctagtttgctgaagcttaaagtttcgacaaatcttttcgaaggtgacaaatttgtaggtacatttgaaagtgctgctgcaggaacatttgtcattgacatgcgttcttatgagaaacttgctaatagcatctctccagaaaagttgaaaagttatgctgctagctataatagatataagtactatagtggtaatgcaaatgaagctgattaccgttgcgcttgttatgcctatttagcaaaagcaatgttggacttttcgcgtgatcataatgacatcttgtacacacctccgactgtcagttatggttctacattacaggctggtttgcgcaaaatggcacaaccatctggctttgtggagaaatgtgttgtccgtgtctgctatggaaacactgtgttgaatgggttgtggcttggtgatattgtttattgcccacgtcatgttatcgcatctaacacaacttctgctatagattatgatcacgaatatagtattatgcggttgcataatttttctataatatctggtacagcatttcttggtgttgtaggtgctactatgcatggagtaactcttaaaattaaggtttcacagactaacatgcacacacctagacattcttttagaacactaaaatctggtgaaggttttaacatcttagcatgctatgatggttgtgctcaaggtgtttttggtgtgaacatgagaactaattggactatccgtggttcatttattaatggtgcgtgtggttcccctggctacaatcttaaaaatggcgaggtggaatttgtttatatgcatcaaattgaactcggaagtggtagccatgtaggttctagctttgatggtgttatgtatggtggttttgaagaccaacctaatcttcaagttgaatctgcaaaccagatgttaacagttaatgtggttgcatttctttatgctgctatattgaatggttgcacatggtggcttaaaggtgaaaaattgtttgtggagcattataatgagtgggcacaggctaatggtttcacagctatgaatggtgaagacgctttttccattcttgctgctaaaactggtgtctgtgtggaaagattacttcatgctattcaagttttgaataatggctttggtggtaaacaaattttgggttattctagtctcaatgatgagttcagtattaatgaagttgtcaaacaaatgtttggtgttaacctgcaaagtggtaaaaccactagtatgtttaaatccataagcttatttgctggcttctttgtcatgttctgggctgaattatttgtttataccaccactatttgggttaaccctggttttcttactccgtttatgattttgcttgttgctttgtcactctgtcttacatttgttgttaaacataaggttttgtttttgcaagtgtttttgttgccttcaattattgtggctgctattcaaaactgtgcttgggactaccatgttacaaaggtgttggcagagaagtttgattataatgtttctgttatgcaaatggacatccagggttttgttaacatttttatttgtctttttgttgcactgttgcatacttggcgctttgctaaagagcgttgtacacattggtgcacttatttgttctcactcattgctgttttatacactgcattgtatagttatgactacgttagtttgctggttatgctactttgtgcaatttctaatgaatggtatattggtgctattatttttagaatttgtcgttttggtgttgcatttttaccagtggaatacgtgtcttactttgatggtgttaaaactgtgctgttgttttacatgttgttaggctttgttagctgtatgtactatggtttgttgtactggattaacaggttctgtaagtgcacattaggtgtttatgatttctgtgttagtccagccgaatttaagtatatggttgctaatggtttgaatgcaccaaatggcccttttgatgcgctctttctgtcttttaaactaatgggtattggcggtcctagaaccattaaagtttctactgtacagtctaaattgactgatcttaagtgcacaaacgtcgttctaatgggcattttgtctaacatgaacatagcttctaattcaaaggagtgggcatattgtgttgaaatgcacaataaaataaacttgtgtgacgaccctgaaactgctcaagagttattgctggcgttgttggcctttttcttgtctaagcatagtgattttggtcttggtgatcttgtcgattcttattttgagaacgactccattttgcaaagtgttgcatcttcttttgttggtatgccatcttttgttgcatatgaaacagcaagacaagagtatgaaaatgctgttgcaaatggttcctcaccacaaataatcaaacaattgaagaaggctatgaatgttgcaaaagctgagtttgacagggaatcatctgttcaaaagaaaattaacagaatggctgaacaagctgctgcagctatgtacaaagaagcacgtgctgttaatagaaaatcaaaagttgttagtgccatgcatagtttactctttggcatgctccgacgtttggacatgtctagtgttgacactatccttaatatggcacgtaatggtgttgtccctctttccgttatccctgctacttctgcagccaggctcgtcgtcgtagtaccagatcatgattcatttgtgaaaatgatggtagatggttttgtgcactacgctggtgttgtttggacattacaggaagttaaggataatgatggtaagaatgtgcatcttaaagatgttacaaaggaaaaccaggaaatacttgtttggcctctgattttgacttgtgaacgtgtcgttaaattgcagaacaatgaaataatgccgggcaagatgaaggtcaaggccaccaaaggtgaaggtgatggaggcattactagtgaaggtaatgctctatacaacaatgaaggtggacgtgcattcatgtatgcatatgtgactacgaagcctggcatgaagtatgttaaatgggaacatgactctggtgtggttacagttgaattggaaccaccttgcagatttgttatagacacacctactggaccccaaattaagtatctttattttgttaagaatcttaacaatttaaggagaggtgctgttttgggttacattggtgccactgtgagattgcaagctggcaaacagactgagtttgtttcaaactcccatttattaacacattgttcttttgctgttgacccagctgcagcctatcttgatgctgttaaacaaggcgcaaaacctgttggcaattgtgtaaagatgttgactaatggttctggtagcggtcaggctattacttgtaccattgattccaacactacgcaggacacatatggtggcgcgtctgtttgtatttattgcagagcacatgttgcacatccaaccatggacggtttttgtcagtacaaaggcaagtgggtacaagtgcctataggtacaaatgaccctataagattttgtcttgaaaatactgtttgtaaagtttgtggttgttggcttaatcatggctgtacatgtgaccggactgctatccaaagttttgataacagttatttaaacgagtccggggctctagtgccgctcgactagagccctgtaatggtacagacatagattactgtgtccgtgcatttgacgtttacaataaagatgcgtcttttatcggaaaaaatctgaagtccaattgtgtgcgcttcaagaatgtagataaggatgacgcgttctatattgttaaacgttgcattaagtcagttatggaccacgagcagtccatgtataacttacttaaaggctgtaatgctgttgctaagcatgatttctttacttggcatgagggcagaaccatttatggtaatgttagtagacaggatcttactaaatacaccatgatggatttgtgcttcgctctgcgtaactttgatgaaaaagactgtgaagtttttaaggagatattggttcttactggttgttgtagtactgattactttgaaatgaagaattggtttgaccccatagaaaatgaggacatacaccgtgtgtatgctgctttaggtaaggtagttgcaaatgcaatgcttaagtgtgttgctttttgcgacgaaatggtgctcaaaggagttgttggtgttttgaccttagacaaccaagatcttaatgggaatttctatgacttcggtgactttgtattgtgtcctcctggaatgggaataccctactgcacgtcatactattcttatatgatgcctgttatgggtatgactaattgtttagctagtgagtgctttatgaaaagtgacatctttggtcaagacttcaaaacttttgatttgttgaaatatgatttcacagaacataaggaggttttgtttaacaagtactttaagtattggggacaggattatcatcctgattgtgttgattgccatgacgagatgtgtattttgcattgttcaaattttaacacactcttcgcaaccacaattccaaacacggcttttggacctctatgcagaaaagtgtttattgatggtgtacccgtagttgctactgctggttaccactttaaacaattaggacttgtgtggaacaaagatgttaacactcattctaccagacttactattactgaactcttacagtttgtgacagatccaacgcttatagttgcgtcatcgcctgccttggtggataaacgcactgtttgtttttctgtcgctgctttgagtacaggattaacatcccaaacagtaaaacctggccattttaataaggagttttatgacttcttacgttctcaggggtttttcgatgagggttcagaattaacattgaagcatttcttttttacacaaaagggtgatgctgcaattaaagattttgattattatcgttacaacagacctactatgctggatattggacaagctcgcgtagcatatcaagtggcagctcgctattttgactgttacgagggtggctgtattacatctagagaggttgttgttacaaaccttaataaaagcgctggttggccccttaataagtttggtaaagctggtttatattatgagtctattagttatgaggaacaagatgctattttttcattaacaaagcgtaatattctccctactatgactcagttaaatcttaaatacgccatatctggtaaggaacgcgcacgtacagtgggtggcgtctctttattagctactatgactacaagacagtttcatcagaaatgtctgaaatccatagtagctaccagaaatgccaccgttgttatcggcactaccaagttttatggcgggtgggataatatgttaaagaacctgatggccgatgttgatgatcctaaattgatgggatgggactatcctaagtgtgatagagctatgccctcaatgattcgtatgttgtcggctatgatcttaggttctaagcatgtcacatgttgtacggctagtgataaattttatagacttagtaatgagcttgctcaagttttgaccgaggttgtttattcaaatggtgggttttattttaaacctggtggtacaacttctggtgatgcaactacagcctacgccaattctgtctttaatatatttcaggctgtaagttctaacattaattgcgttttgagcgttaactcgtcaaattgcaataattttaatgttaagaagttacagagacaactttatgataattgctatagaaatagtaatgttgatgaatcttttgtggatgacttttatggttatttgcaaaagcatttttctatgatgattctttctgatgatagtgttgtgtgctataataaaacttatgctggacttggttacattgctgatattagtgcttttaaagccactttgtattatcagaatggtgtgtttatgagtacagctaagtgttggactgaggaagatctttctataggacctcatgaattttgctcacagcacactatgcagattgtagatgaaaatggtaagtattatctaccatatccagatcctagccgtattatttctgctggtgtttttgtggatgacatcactaagactgatgctgtcattcttttggaacgctatgtttctctggctatagatgcctacccattgtctaagcatcctaaacctgagtacaggaaggtgttttacgcattgttagactgggtcaaacatctcaacaagactcttaacgaaggtgttttggagtctttttctgttacacttttagatgaacatgagtctaagttttgggatgaaagcttttatgctagtatgtatgagaagtctacagtattacaagctgctggtctttgtgtagtatgtggttctcaaacagttctaagatgcggtgattgtttacgcagaccgatgttgtgcactaagtgcgcctatgatcatgtgtttggcactgatcataagttcattttagctattacaccatatgtgtgtaacacatctggctgcaatgtaaatgacgttacaaaactgtatcttggaggtttgaattattactgtgtagaccacaaaccacatctttcattcccactgtgttcagctggtaatgtctttggtttgtacaaaagttctgctttgggttccatggacattgatgtctttaacaaactttctacctctgattggtctgacattcgcgactacaagcttgctaatgatgcaaaagagtcactaaggttgtttgcagctgaaacggtcaaggctaaagaggaaagtgttaagtcatcatacgcttatgctaccctaaaggagattgtaggtcctaaggaacttttgctcttatgggaaagtggaaaagccaaaccaccgttaaaccgtaattctgtttttacatgcttccaaattacaaaagactccaagtttcaagttggtgagtttgtgtttgagaaagtagattacggttctgatacggttacttacaaatccactgctactactaagttagtaccaggtatgttgtttattttgacttctcataatgttgctccacttagagcgccaacaatggcaaaccaggagaaatattctaccatttacaagttgcacccatcatttaatgttagtgatgcttatgcaaatcttgtaccttattaccaacttattggcaaacagcgtataaccacaatacagggtcctcctggtagtggaaaatcgcattgttctattggtattggtgtgtattaccctggagcgaggatcgtgttcaccgcttgttctcacgctgctgttgattcgctctgtgcaaaagctgtcacagcctatagtgttgataagtgtacacgtattattcctgcacgtgccagagttgagtgttatagtggttttaaacctaacaataatagtgcacaatacgtgtttagtactgttaatgcgttacctgaagttaatgcagacattgttgtcgtggatgaggtgtctatgtgcactaactatgacttgtctgtgattaaccagcgtatatcatataaacacattgtatatgttggtgatcctcaacagcttccagctcctagagttcttatctctaaaggtgttatggaaccaattgactataatgttgtgacacaacgtatgtgtgctataggacccgatgtctttttacacaagtgttacagatgtcctgctgaaatagttaacactgtttcagagcttgtttatgaaaacaagtttgtacctgtcaaagaagctagtaagcagtgcttcaaaatctttgaacgcggtagtgttcaggtagacaatggctccagtataaataggcgtcaacttgatgttgttaagcgatttatacataaaaactccacatggagcaaggctgtgtttatctcaccttacaatagtcaaaattatgtagctgccaggcttttaggcttacaaactcagacagtggattctgctcaaggtagtgaatatgactatgttatattcgcacagacatcagatactgctcatgcctgtaatgccaatcgttttaacgttgccattactagagcaaagaaaggtattttctgtattatgtctgacagaactttgtttgatgcacttaagttctttgaaatcactatgacagatttacagtctgaaagtagttgtggtttgtttaaggattgtgcacgtaaccctattgatttaccaccaagtcatgccactacttatttgtcattgtctgatagatttaagactagtggtgacttggctgttcaaataggtaacaacaatgtttgtacctatgaacatgtgatttcatatatgggtttcaggtttgatgttagcatgcctggtagtcatagtttgttctgtactagagactttgccatgcgtcatgtcagaggttggttaggaatggatgtggaaggtgcacatgtcacaggtgacaatgttggcactaatgtacctctacaagttggtttttccaatggtgttgattttgtagctcaacctgaaggttgtgttctaacaaacactggcagtgttgtaaaacctgttcgtgctcgtgcaccacctggagaacaattcactcacattgtacctctgttacgcaagggacaaccttggagtgtgttgagaaaacgtattgttcaaatgatagcagattttcttgctggctcatctgatgtactggtgtttgtactttgggctggcggtttagagttgaccactatgcgttattttgttaagattggagctgttaaacattgccaatgtggtactgttgcaacatgctacaattctgttagtaatgactattgttgctttaaacatgcattgggctgtgactatgtttataatccatatgtcatagatattcaacaatggggttatgttggttcactctccactaatcaccatgcaatttgtaatgttcatagaaatgagcatgttgcttctggtgatgctattatgactagatgtttggctgtgtatgactgctttgttaagaatgtggattggtcaattacctaccctatgatagctaatgaaaatgccataaacaagggcggtcgcactgtgcagagtcatattatgcgtgctgctattaaattgtacaaccctaaagcaatccatgacattggtaatcctaagggtattcgttgtgctgtaactgatgccaagtggtattgttatgacaagaaccctattaattctaatgtgaaaacattggagtatgattacatgacacatggccaaatggatggcttgtgtttgttttggaattgtaatgtggatatgtaccctgaattctcaattgtttgcaggtttgacacacgtacacgatctacattgaaccttgaaggtgtaaatggtgggtcattgtatgtcaataatcatgcatttcacactcctgcttatgataaacgtgctatggctaaattgaaaccagcaccgtttttctactatgacgacggttcatgtgaggttgttcacgatcaagttaactatgttcctttgagagccactaattgcattaccaagtgtaatattggtggtgctgtatgttctaagcacgctaatctctatagagcatatgttgagtcatataacatttttactcaagctggttttaatatttgggttcctaccacgtttgattgttataatttgtggcagacattcacagaggtcaatttacaaggtttagagaacattgcttttaacgttgttaataaaggttcatttgttggtgctgatggtgaattaccagtagccattagtggtgataaagtgttcgtacgtgatggtaacactgataatttagtctttgttaacaaaacatcactgcctacaaacatagcatttgaactttttgctaagaggaaggttggtttaacaccacctctcagtattctcaaaaaccttggtgttgtcgccacatataagtttgtcttgtgggattatgaagctgagcgtcccttgacaagctttactaagtctgtttgtggttatacagactttgcagaggatgtttgtacttgttacgataatagtatacaaggttcatacgaacgttttactctgtcaactaatgctgtgttattctctgctactgctgtgaaaacaggtggtaagagtttgccggctattaaattgaattttggaatgcttaatggtaatgcaattgctactgtcaaatcagaagatggtaacataaaaaatattaactggtttgtttacgtacgcaaagatggcaaacctgttgatcattatgatggtttttatacccaaggtcgtaatttacaagactttttgcctcgcagcacaatggaagaagactttttgaacatggatataggcgtgtttattcaaaagtatggtctagaggatttcaacttcgagcacgttgtgtatggtgatgtttcaaaaactactctaggcggtttacacttgttgatttcacaagtacgtctgagtaaaatgggcatcttaaaggcagaggagtttgtggcagcatctgacataacactcaaatgttgtactgtgacttatcttaatgatcctagttctaagactgtttgtacttacatggatttgttgttggatgattttgtttctgtattgaagtctttggatttgactgttgtatccaaggttcatgaggtcataattgacaacaaaccatggagatggatgctatggtgtaaagataatgccgttgctacattctatcctcagttgcagagtgcagaatggaaatgcgggtattctatgcctggtatttataagacacaacgtatgtgcttagaaccatgtaatttgtataattatggtgcaggtttgaagttgcccagtggcattatgttcaatgttgttaaatacactcaattgtgtcaatattttaacagtaccacgttatgtgttcctcataatatgagagtgttacacttgggtgctggctctgattatggtgttgcaccaggaactgctgttcttaaaaggtggttgccgcacgacgcaattgttgttgacaacgatgttgttgactatgtgagtgacgctgattttagtgttactggtgattgtgcaaccgtttatttggaagacaagtttgacttgttaatctctgatatgtacgatggtaggacaaaggcaattgatggtgaaaatgtttcgaaagaaggatttttcacttacatcaatggtttcatttgtgaaaaacttgccatcggaggttcgattgctattaaagtaacagagtatagctggaataagaaattgtatgaacttgtacaaagattttctttttggactatgttttgcacttctgttaatacgtcatcatcagaagcctttgttgtcggaattaactatcttggtgatttcgcacaaggaccttttatagatggtaacataatacacgcaaattatgtattttggcgtaactccactgttatgagtttgtcctacaactctgttttagacctgagtaaatttaattgcaaacacaaagcgactgttgttgtgcaattaaaggatagtgatattaatgaaatggtgcttagtcttgttaggagtggtaagttgcttgtaaggggtaatggcaagtgtttgagttttagtaatcatttagtctcaactaaataaaatgtttgttttgcttgttgcatatgccttgttgcatattgctggttgtcaaactacaaatgggctgaacactagttactctgtttgcaacggctgtgttggttattcagaaaatgtatttgctgttgagagtggtggttatataccctccgactttgcattcaataattggttccttctaactaatacctcatctgttgtagatggtgttgtgaggagttttcagcctttgttgcttaattgcttatggtctgtttctggcttgcggtttactactggttttgtctattttaatggtactgggagaggtgattgtaaaggtttttcctcagatgttttgtctgatgtcatacgttacaacctcaattttgaagaaaaccttagacgtggaaccattttgtttaaaacatcttatggtgttgttgtgttttattgtaccaacaacactttagtttcaggtgatgctcacataccatttggtacagttttgggcaatttttattgctttgtaaatactactattggcaatgaaactacgtctgcttttgtgggtgcactacctaagacagttcgtgagtttgttatttcacgcacaggacatttttatattaatggctatcgctatttcactttaggtaatgtagaagccgttaatttcaatgtcactactgcagaaaccactgatttttgtactgttgcgttagcttcttatgctgacgttttggttaatgtgtcacaaacctctattgctaatataatttattgcaactctgttattaacagactgagatgtgaccagttgtcctttgatgtaccagatggtttttattctacaagccctattcaatccgttgagctacctgtgtctattgtgtcgctacctgtttatcataaacatacgtttattgtgttgtacgttgacttcaaacctcagagtggcggtggcaagtgctttaactgttatcctgctggtgttaatattacactggccaattttaatgaaactaaagggcctttgtgtgttgacacatcacacttcactaccaaatacgttgctgtttatgccaatgttggtaggtggagtgctagtattaacacgggaaattgccctttttcttttggcaaagttaataactttgttaaatttggcagtgtatgtttttcgctaaaggatatacccggtggttgcgcaatgcctatagtggctaattgggcttatagtaagtactatactataggctcattgtatgtttcttggagtgatggtgatggaattactggcgtcccacaacctgttgagggtgttagttcctttatgaatgttacattggacaaatgtactaaatataatatttatgatgtatctggtgtgggtgttattcgcgttagcaatgacacctttcttaatggaattacgtacacatcaacttcaggtaaccttctgggttttaaagatgttactaagggcaccatctactctatcactccttgtaacccaccagatcagcttgttgtttatcagcaagctgttgttggtgctatgttgtctgaaaattttactagttacggcttttctaatgttgtagaactgccgaaatttttctatgcgtccaatggcacttataattgcacagacgctgttttaacttattctagttttggcgtttgtgcagatggttctataattgctgttcaaccacgtaatgtttcatatgatagtgtttcagctatcgtcacagctaatttgtctataccttccaattggaccacttcggtccaggttgagtatttacaaattacaagtacacctatcgtagttgattgctccacttatgtttgcaatggtaatgtgcgctgtgttgaattgcttaagcagtatacttctgcttgtaaaactattgaagacgccttaagaaatagcgccaggctggagtctgcagatgttagtgagatgctcacttttgacaagaaagcgtttacacttgctaatgttagtagttttggtgactacaaccttagcagcgtcatacctagcttgcccacaagtggtagtagagtggctggtcgcagtgccatagaagacatactttttagcaaacttgttacttctggacttggcactgtggacgcagactacaaaaagtgcactaagggtctttccattgctgacttggcttgtgctcaatattataatggcattatggttttgcctggcgtcgctgatgctgaacgaatggccatgtatacaggttctttaattggtggaattgctttaggaggtctaacatcagccgtttcaataccattttcattagcaattcaggcacgtttaaattatgttgcattgcagactgatgttttacaagaaaatcagaaaattcttgctgcatcttttaacaaagcaatgaccaacatagtagatgcctttactggtgttaatgatgctattacacaaacttcacaagccctacaaacagttgctactgcacttaacaagatccaggatgttgttaatcaacaaggcaactcattgaaccatttaacttctcagttgaggcagaattttcaagctatctctagctctattcaggctatctatgacagacttgacactattcaggctgatcaacaagtagataggctgattactggtagattggctgctttgaatgtattcgtttctcatacattgactaagtacactgaagttcgtgcttccagacagcttgcacaacaaaaagtgaatgagtgtgtcaaatcccagtctaagcgttatggcttctgtggaaatggcactcacattttctcaattgttaatgctgctcctgaggggcttgtttttctccacactgtcttgttgccgacacaatataaggatgttgaagcgtggtctgggttgtgcgttgatggtacaaacggttatgtgttgcgacaacctaatcttgctctttacaaagaaggcaattattatagaatcacatctcgcataatgtttgaaccacgtattcctaccatggcagattttgttcaaattgaaaattgcaatgtcacatttgttaacatttctcgctctgagttgcaaaccattgtgccagagtatattgatgttaataagacgctgcaagaattaagttacaaattgccaaattacactgttccagacctagttgtcgaacagtacaaccagactattttgaatttgaccagtgaaattagcacccttgaaaataaatctgcggagcttaattacactgttcaaaaattgcaaactctgattgacaacataaatagcacattagtcgacttaaagtggctcaaccgggttgagacttacatcaagtggccgtggtgggtgtggttgtgcatttcagtcgtgctcatctttgtggtgagtatgttgctattatgttgttgttctactggttgctgtggcttctttagttgttttgcatcttctattagaggttgttgtgaatcaactaaacttccttattacgacgttgaaaagatccacatacagtaatggctctaggtttgttcacattgcaacttgtgtctgctgttaatcaatcgcttagcaatgcgaaagttagtgctgaagtttcacgacaggttatccaagacgtgaaagatggcactgttaccttcaacttgctagcgtatacactaatgagcctctttgttgtgtattttgctttatttaaagcaagatcacaccgtggcagagctgctcttatagtgtttaaaattctaatccttttcgtttatgtgccattgctgtattggtctcaagcatatatttacgcaactttgattgctgtaattttgcttggaagatttttccatacagcttggcactgctggctctacaagacatgggatttcattgtcttcaatgtaaccacactttgctatgcaaggtaagtgttggtttcttgaaaataaggctctgaaaccattcgtttgtttttacggaggggatcaattcctttacataggcgacagaattgtttcttatttctcaactaacgacttgtacgttgctcttagaggacgtattgataaagacctcagcctttctagaaaggttgagttatataacggtgaatgtgtatacttgttttgtgaacacccagctgttggaatagtcaacacagatttcaaattagaaatccactaagatgttccttaagctagtggatgatcatgctttggttgttaatgtactactctggtgtgtggtgcttatagtgatactactagtgtgtattacaataattaaactaattaagctttgtttcacttgccatatgttttgtaatagaacagtttatggccccattaaaaatgtgtaccacatttaccaatcatatatgcacatagaccctttccctaaacgagttattgatttctaaactaaacgacaatgtcaaatgacaattgtacgggtgacattgtcacccatttgaagaattggaattttggttggaatgttattctaaccatattcattgttattcttcagtttggacactataaatactccagattgttttatggtttgaagatgcttgtactgtggcttctttggccactcgtacttgctttgtcaatctttgacacctgggctaattgggattctaattgggcctttgttgcatttagcttttttatggccgtatcaacactcgttatgtgggtgatgtacttcgcaaacagtttcagacttttccgacgtgctcgaactttttgggcatggaatcctgaggttaatgcaatcactgtcacaaccgtgttgggacagacatactatcaacccattcaacaagctccaacaggcattactgtgaccttgctgagcggcgtgctttacgttgacggacatagattggcttcaggtgttcaggttcataacctacctgaatacatgacagttgccgtgccgagcactactataatttatagtagagtcggaaggtccgtaaattcacaaaatagcacaggctgggttttctacgtacgagtaaaacacggtgatttttctgcagtgagctctcccatgagcaacatgacagaaaacgaaagattgcttcattttttctaaactgaacgaaaagatggctacagtcaaatgggctgatgcatctgaaccacaacgtggtcgtcagggtagaataccttattctctttatagccctttgcttgttgatagtgaacaaccttggaaggtgatacctcgtaatttggtacccatcaacaagaaagacaaaaataagcttataggctattggaatgttcaaaaacgtttcagaactagaaagggcaaacgggtggatttgtcacccaagctgcatttttattatcttggcacaggaccccataaagatgcaaaatttagagagcgtgttgaaggtgtcgtctgggttgctgttgatggtgctaaaactgaacctacaggttacggtgttaggcgcaagaattcagaaccagagataccacacttcaatcaaaagctcccaaatggtgttactgttgttgaagaacctgactcccgtgctccttcccggtctcagtcgaggtcgcagagtcgcggtcgtggtgaatccaaacctcaatctcggaatccttcaagtgacagaaaccataacagtcaggatgacatcatgaaggcagttgctgcggctcttaaatctttaggttttgacaagcctcaggaaaaagataaaaagtcagcgaaaacgggtactcctaagccttctcgtaatcagagtcctgcttcttctcaaacttctgccaagagtcttgctcgttctcagagttctgaaacaaaagaacaaaagcatgaaatgcaaaagccacggtggaaaagacagcctaatgatgatgtgacatctaatgtcacacaatgttttggccccagagaccttgaccacaactttggaagtgcaggtgttgtggccaatggtgttaaagctaaaggctatccacaatttgctgagcttgtgccgtcaacagctgctatgctgtttgatagtcacattgtttccaaagagtcaggcaacactgtggtcttgactttcactactagagtgactgtgcccaaagaccatccacacttgggtaagtttcttgaggagttaaatgcattcactagagaaatgcaacaacatcctcttcttaaccctagtgcactagaattcaacccatctcaaacttcacctgcaactgctgaaccagtgcgtgatgaagtttctattgaaactgacataattgatgaagtaaactaaacatgccactgtgttgtttgaaattcaggctttagttggaattttgcttttgttctttcttttattatctttcttttgcctgtttttagagagatttggcgccttggtgccgtagatgaatacattgcttttctctgatctatgtatgatggtacgatcagagctgcttttaattaacatgatcccttgctttggcttgacaaggatctagtcttatacacaatggtaagccagtggtagtaaaggtataagaaatttgctactatgttactgaacctaggtgaacgctagtataactcattacaaatgtgctggagtaatcaaagatcgcattgacgagccaacaatggaagagccagtcatttgtcttgagacctatctagttagtaactgctaatggaacggtttcgatatggatacacaaaaaaaaaaaaaaaaaaaaaaaaaaaaaaaaaaaaaaaa

SEQ ID NO: 31 - DNA, 27317 bp, Coronavirus; identical to SEQ ID NO: 30

SEQ ID NO: 32 - DNA, 20580 bp, Coronavirus
acttaagtaccttatctatctacagatagaaaagttgctttttagactttgtgtctacttttctcaactaaacgaaatttttgctatggccggcatctttgatgctggagtcgtagtgtaattgaaatttcatttgggttgcaacagtttggaagcaagtgctgtgtgtcctagtctaagggtttcgtgttccgtcacgagattccattctacaaacgccttactcgaggttccgtctcgtgtttgtgtggaagcaaagttctgtctttgtggaaaccagtaactgttcctaatggcctgcaaccgtgtgacacttgccgtagcaagtgattctgaaatttctgcaaatggctgttctactattgcgcaagccgtccgccgttatagcgaggccgctagcaatggttttagggcatgccgatttgtttcattagatttgcaggattgcatcgttggcattgcagacgatacatatgttatgggtctgcatggcaatcagacgttgttttgcaacataatgaaattttctgaccgtccttttatgcttcatgggtggttggttttttccaattcaaattaccttttggaggaatttgatgttgtcttcggtaagagaggtggtggtaatgtgacatacactgaccagtatctctgtggcgccgatggcaaacctgttatgagtgaagatttatggcagtttgttgaccatttcggtgagaacgaagaaattatcatcaatggtcatacttacgtttgtgcttggcttactaagcgtaagcccttagattacaaacgtcagaacaaccttgccattgaagagattgaatatgtgcatggtgatgctttgcatacactacgcaatggttctgttcttgaaatggctaaggaagtgaagacatctagtaaagttgtgttaagcgatgctcttgacaaactttacaaagtctttggttctcctgttatgacaaatggttccaacatcctagaggcctttactaaacctgtgtttattagtgcattagttcaatgtacttgtggtaccaagtcttggtctgttggtgattggaccggttttaaatcctcttgttgcaacgtgatcagtaataaactgtgtgttgttcccggtaatgttaaacctggtgatgctgtgattaccactcagcaagctggtgctggtattaagtatttttgtggcatgactcttaagtttgttgcaaatattgaaggtgtctctgtttggagagtgattgctcttcagagtgtggattgctttgttgcttcttccacttttgtagaagaggaacatgttaatagaatggatacattctgcttcaatgtacgcaatagtgttactgatgagtgtcgtctggccatgttgggtgctgaaatgactagtaatgtcagaagacaagttgcttcaggtgtcatagacattagtaccggttggtttgatgtttatgatgacatctttgctgaaagcaaaccatggtttgttcgcaaggctgaagacatttttggcccttgttggtccgctcttgcttctgcacttaaacaacttaaagtcactacaggtgaacttgtgagatttgttaagtctatttgcaattcagctgttgctgtcgtgggtggtactatacaaattctcgctagtgtgcctgagaagtttttgaatgcgtttgacgtgtttgtcacagctattcaaactgtctttgactgtgctgttgaaacttgtactattgccggtaaagcatttgacaaggtttttgactatgtcttgcttgataatgcgcttgtaaaacttgtcaccacaaagcttaagggtgttcgtgaacgtggccttaataaagttaagtatgcaacagttgttgttggttccactgaagaagttaaatcttcacgtgttgaacgtagcactgctgtacttacaatcgccaacaattattccaaactttttgatgaagggtatactgttgtaattggcgatgtggcgtactttgttagtgacggctacttccgtcttatggccagtccaaatagtgtgttgactactgcagtctataaaccattgtttgcttttaatgtgaatgttatgggtactagacctgaaaaatttccaaccactgtgacttgtgaaaatttagagtctgctgttttgtttgttaatgacaaaattactgaattccaattggattacagtattgatgtcattgataatgaaataattgtcaaacctaatatcagcctatgtgttccactttatgtgagagactatgttgacaaatgggatgatttttgcagacaatatagtaacgagtcttggtttgaggatgattacagggcttttatcagtgttttggacatcactgatgctgctgtgaaagctgcagagtctaaagctttcgttgatactattgttccaccttgcccatctattttgaaagttatagatggaggcaaaatatggaatggtgttattaaaaatgttaactctgttagagactggcttaagtctttgaagttaaatctcacacaacagggtttgcttggaacatgtgcaaagcgttttaaacgttggcttggcattttgctagaggcctataatgcgtttttagacactgtggtttctactgttaaaattggtggcttgacctttaaaacatatgcttttgataaaccttacattgtgatacgtgatatcgtgtgtaaggttgaaaataaaacagaagcagaatggattgagctttttccacataatgacaggattaagtcttttagtactttcgagagtgcttacatgccaattgcagaccctacacattttgacattgaagaagttgaacttttagatgcagagtttgtagaaccaggctgtggtggtattttggcagtaatagatgagcacgtcttttataagaaggatggtgtttattatccatcaaatggtactaacattctacctgttgcatttacaaaagccgctggtggtaaagtttcattttctgatgacgttgaagtaaaagacattgaacctgtttacagagtcaagctttgctttgagtttgaagatgaaaaacttgtagatgtttgtgaaaaggcaattggcaagaaaattaaacatgaaggtgactgggatagcttttgtaagactattcaatcagcactttctgttgtttcttgctatgtaaatctacctacttattacatttatgatgaagaaggcggtaatgacttgagtttgcccgttatgatttctgaatggcctctttctgttcaacaagctcaacaagaagctactttacctgatattgctgaggatgttgttgaccaagttgaagaagtcaatagcatttttgacattgagacagtggatgttaaacatgatgtgagtccttttgaaatgccatttgaagagttaaatggtttaaagatactcaaacaattggataacaactgctgggttaactcagttatgttacaaatacaattaactggtatacttgatggtgactatgctatgcagttttttaaaatgggccgagttgccaagatgattgaacgctgctacactgctgagcaatgtatacgtggtgctatgggtgatgttggtttgtgtatgtatagactgcttaaagacttacacactggttttatggttatggattataaatgtagttgtaccagtggtaggcttgaagaatcgggagctgttttgttttgtacgcccactaagaaggcgtttccttatggtacttgtctaaattgtaacgcacctcgcatgtgtacaattaggcagttacaaggtaccataatatttgtgcaacaaaaaccagaacctgttaatcctgtttcttttgttgttaaaccagtctgctcatcaatttttcgtggtgctgtgtcttgtggtcattaccagactaacatctattcacaaaatttgtgtgtggatggttttggtgttaacaagattcagccctggacaaatgatgcacttaatactatttgtattaaggatgcagattataatgcaaaagttgaaatatctgttacaccaattaaaaatacagttgatacaacacctaaggaagaatttgttgttaaagagaagttgaacgccttcctcgttcatgacaatgtagctttctaccaaggtgatgttgatactgttgttaatggtgttgactttgactttattgtaaatgctgctaatgagaaccttgctcatggtggaggacttgccaaagctttagatgtgtacactaaaggtaaacttcaacgtttatctaaagaacacattggattagcgggtaaagtaaaagttggtacaggagttatggttgagtgtgatagccttagaatttttaatgttgttggtccacgcaagggtaaacatgaacgtgatttactcataaaagcttacaacactattaataatgaacaaggcacacctttaacaccaattttgagctgtggtatttttggtatcaaactcgaaacttcattagaagttttgcttgatgtttgtaatacaaaagaagttaaagtttttgtttatacagacacagaggtttgtaaggttaaggattttgtgtctggtttagtgaatgttcaaaaagttgagcaacctaaaatagaaccaaaaccagtgtccgtaattaaagttgcacccaagccttacagggtagatggtaaatttagttactttacagaagacttgttgtgtgtcgctgatgacaaacccattgttttgtttactgactctatgcttactttggatgaccgtggtttagctctagacaatgcacttagtggtgtgcttagtgctgctattaaggattgtgttgacataaataaagctataccttctggtaatcttattaagtttgatataggttctgttgttgtctacatgtgtgttgtgccatccgaaaaggacaaacatttagataataatgttcaacgatgcacacgtaagttgaatagacttatgtgtgatatagtttgtactataccagctgactacatcttgccattggtgttgtctagtttgacttgtaatgtttcttttgtaggtgaacttaaagctgctgaagctaaagttataactataaaggtgacagaggatggtgttaatgttcatgatgtgaccgtgacaacagacaagtcatttgaacaacaagttggtgttattgctgataaggacaaagatctttctggtgcagtaccaagtgatcttaacacatctgaattgcttactaaagcaatagatgttgattgggtcgaattttatggctttaaagatgctgttacttttgcaacagttgatcatagtgcttttgcctatgaaagtgctgttgttaatggtattagagtgttaaaaactagtgataataattgttgggtgaatgctgtttgtattgcactacagtattcgaaaccccattttatttcacaaggtcttgatgctgcgtggaataaatttgttttaggcgatgttgaaatttttgttgcatttgtttactatgttgcaagactaatgaaaggtgacaagggtgatgctgaagacactttgactaagttgtctaagtatcttgctaatgaagctcaagttcaattagaacattatagttcttgtgttgaatgtgatgctaaatttaaaaactctgttgcatctatcaattctgctatagtttgtgctagtgtcaaacgtgatggtgtgcaagttggttattgtgtccatggtattaagtactattcacgtgttagaagtgttagaggtagagctattatagtcagtgtcgaacagcttgaaccgtgtgctcagtctagacttttgagtggtgttgcttatactgctttttctggacctgttgacaaaggtcattatactgtttatgatactgcaaagaaatcaatgtatgatggtgatcgttttgttaaacatgatctttctctgctgtctgtcacatcagttgttatggttggtggttatgttgcacctgttaatacagtgaaacctaaaccagtcattaatcaacttgatgaaaaggcacagaagttctttgattttggtgattttttgattcataattttgttatttttttcacatggttattgagtatgtttactttgtgtaaaactgcagtaactacaggtgatgttaaaataatggccaaagcaccacaaaggacgggtgttgttttaaaacgtagtcttaaatataacttaaaagcgtcacaggctgttcttaaatctaagtggtggctgcttgctaagtttacgaaactactgttactcatatatacattgtactcagtagttttgctttgtgtacgttttggaccgtttaatttttgtagtgagactgttaatggttatgctaagtcaaactttgtcaaggatgattactgtgatggttcattgggctgcaagatgtgtctttttggttaccaagagttaagtcaatttagccatttggatgttgtgtggaagcatataacagaccctttgtttagtaatatgcaacctttcattgtcatggttttgctgcttatatttggtgacaattatttgagatgcttcttgctgtattttgttgctcagatgataagcacagttggtgtttttctaggttacaaggaaacaaattggttcttgcactttattccatttgatgttatttgtgatgaactgcttgtcactgttattgttattaaggttatttcttttgtcagacatgtgctttttggttgtgaaaacccagattgcattgcgtgttctaagagtgctagacttaagagattccctgttaacacaattgtcaatggtgtgcaacgttcattttatgttaatgcaaatggtggtagtaagttttgtaagaaacatagatttttctgtgttgattgtgactcttatggttatggcagcacgtttataacacccgaagtttctagagaacttggtaacattaccaaaacaaatgtgcaaccaacaggcccagcgtatgtcatgattgacaaagtggagtttgaaaatggtttttacagattgtattcctgtgaaacattttggcgttacaactttgatataactgaaagcaagtattcttgcaaagaggtttttaaaaattgtaatgttttggatgatttcatcgtgtttaacaataatgggaccaatgtaacgcaggttaaaaatgctagtgtttacttttcacagttgttgtgtaggcccattaaattagttgacagtgaacttttgtccactttgtcagttgattttaatggtgtcttacacaaggcatacattgatgtactacgtaatagctttggtaaagatcttaatgctaatatgtctttagccgagtgcaagagagctttaggcctgtctattagtgatcatgaatttactagtgctatttctaatgcacatcgttgtgacgtgttgttatctgatttgtcatttaacaactttgtcagttcgtatgctaaacctgaggaaaaattatcagcttatgacttggcgtgttgtatgcgtgcaggtgctaaggttgttaatgccaatgttctgacaaaggaccaaactcctattgtttggcatgcaaaggattttaacagtctttctgctgaaggtcgcaagtatattgtaaaaactagcaaagctaagggtttgactttcttgttgacaattaatgaaaaccaagctgtcacgcaaatacctgcaactagcattgttgctaagcaaggtgctggtgatgctggccattcattaacatggctgtggctactgtgtggtcttgtgtgtttgattcaattctacttgtgctttttcatgccctattttatgtacgatatcgtgagtagttttgagggttatgattttaagtatatagaaaatggtcagttgaagaattttgaagcgccacttaaatgcgtcagaaacgtttttgaaaactttgaggactggcattatgctaagtttggcttcacacctttaaacaagcaaagctgtcctattgtagttggagtttctgaaattgttaatactgtcgctggcattccatctaatgtgtatcttgttggtaaaactttaatttttacactacaagctgcttttggtaatgctggtgtttgttatgacatttttggagtcacaacacctgaaaagtgcatttttacttctgcttgtactagattagaaggtttgggtggtaacaatgtttattgttataacacagcgcttatggaaggttctttgccttacagttcaatacaagctaatgcatattataaatatgacaatggcaattttattaagttgccagaagttattgcacaaggctttggttttagaacagtgcgtactattgccaccaaatactgccgcgtaggtgaatgtgttgaatccaatgcaggtgtgtgttttggctttgacaagtggtttgttaacgatggacgtgttgccaatggttacgtttgtggtactggtttgtggaaccttgtatttaacatactttccatgttttcatcttcattctctgttgctgcaatgtcaggtcaaattttacttaattgtgcattaggtgcttttgctattttttgttgttttcttgtgacaaagtttagacgcatgtttggtgacctttctgtaggtgtttgcactgttgttgtggctgttttgcttaacaatgtctcttacattgtaactcagaatttagtaacaatgattgcttatgccatattgtatttctttgctactagaagcttacgctatgcatggatttggtgtgctgcatatttaattgcgtatatttcttttgctccatggtggttgtgtgcttggtactttcttgctatgttgacaggtttgttacctagtttgctgaagcttaaagtttcgacaaatcttttcgaaggtgacaaatttgtaggtacatttgaaagtgctgctgcaggaacatttgtcattgacatgcgttcttatgagaaacttgctaatagcatctctccagaaaagttgaaaagttatgctgctagctataatagatataagtactatagtggtaatgcaaatgaagctgattaccgttgcgcttgttatgcctatttagcaaaagcaatgttggacttttcgcgtgatcataatgacatcttgtacacacctccgactgtcagttatggttctacattacaggctggtttgcgcaaaatggcacaaccatctggctttgtggagaaatgtgttgtccgtgtctgctatggaaacactgtgttgaatgggttgtggcttggtgatattgtttattgcccacgtcatgttatcgcatctaacacaacttctgctatagattatgatcacgaatatagtattatgcggttgcataatttttctataatatctggtacagcatttcttggtgttgtaggtgctactatgcatggagtaactcttaaaattaaggtttcacagactaacatgcacacacctagacattcttttagaacactaaaatctggtgaaggttttaacatcttagcatgctatgatggttgtgctcaaggtgtttttggtgtgaacatgagaactaattggactatccgtggttcatttattaatggtgcgtgtggttcccctggctacaatcttaaaaatggcgaggtggaatttgtttatatgcatcaaattgaactcggaagtggtagccatgtaggttctagctttgatggtgttatgtatggtggttttgaagaccaacctaatcttcaagttgaatctgcaaaccagatgttaacagttaatgtggttgcatttctttatgctgctatattgaatggttgcacatggtggcttaaaggtgaaaaattgtttgtggagcattataatgagtgggcacaggctaatggtttcacagctatgaatggtgaagacgctttttccattcttgctgctaaaactggtgtctgtgtggaaagattacttcatgctattcaagttttgaataatggctttggtggtaaacaaattttgggttattctagtctcaatgatgagttcagtattaatgaagttgtcaaacaaatgtttggtgttaacctgcaaagtggtaaaaccactagtatgtttaaatccataagcttatttgctggcttctttgtcatgttctgggctgaattatttgtttataccaccactatttgggttaaccctggttttcttactccgtttatgattttgcttgttgctttgtcactctgtcttacatttgttgttaaacataaggttttgtttttgcaagtgtttttgttgccttcaattattgtggctgctattcaaaactgtgcttgggactaccatgttacaaaggtgttggcagagaagtttgattataatgtttctgttatgcaaatggacatccagggttttgttaacatttttatttgtctttttgttgcactgttgcatacttggcgctttgctaaagagcgttgtacacattggtgcacttatttgttctcactcattgctgttttatacactgcattgtatagttatgactacgttagtttgctggttatgctactttgtgcaatttctaatgaatggtatattggtgctattatttttagaatttgtcgttttggtgttgcatttttaccagtggaatacgtgtcttactttgatggtgttaaaactgtgctgttgttttacatgttgttaggctttgttagctgtatgtactatggtttgttgtactggattaacaggttctgtaagtgcacattaggtgtttatgatttctgtgttagtccagccgaatttaagtatatggttgctaatggtttgaatgcaccaaatggcccttttgatgcgctctttctgtcttttaaactaatgggtattggcggtcctagaaccattaaagtttctactgtacagtctaaattgactgatcttaagtgcacaaacgtcgttctaatgggcattttgtctaacatgaacatagcttctaattcaaaggagtgggcatattgtgttgaaatgcacaataaaataaacttgtgtgacgaccctgaaactgctcaagagttattgctggcgttgttggcctttttcttgtctaagcatagtgattttggtcttggtgatcttgtcgattcttattttgagaacgactccattttgcaaagtgttgcatcttcttttgttggtatgccatcttttgttgcatatgaaacagcaagacaagagtatgaaaatgctgttgcaaatggttcctcaccacaaataatcaaacaattgaagaaggctatgaatgttgcaaaagctgagtttgacagggaatcatctgttcaaaagaaaattaacagaatggctgaacaagctgctgcagctatgtacaaagaagcacgtgctgttaatagaaaatcaaaagttgttagtgccatgcatagtttactctttggcatgctccgacgtttggacatgtctagtgttgacactatccttaatatggcacgtaatggtgttgtccctctttccgttatccctgctacttctgcagccaggctcgtcgtcgtagtaccagatcatgattcatttgtgaaaatgatggtagatggttttgtgcactacgctggtgttgtttggacattacaggaagttaaggataatgatggtaagaatgtgcatcttaaagatgttacaaaggaaaaccaggaaatacttgtttggcctctgattttgacttgtgaacgtgtcgttaaattgcagaacaatgaaataatgccgggcaagatgaaggtcaaggccaccaaaggtgaaggtgatggaggcattactagtgaaggtaatgctctatacaacaatgaaggtggacgtgcattcatgtatgcatatgtgactacgaagcctggcatgaagtatgttaaatgggaacatgactctggtgtggttacagttgaattggaaccaccttgcagatttgttatagacacacctactggaccccaaattaagtatctttattttgttaagaatcttaacaatttaaggagaggtgctgttttgggttacattggtgccactgtgagattgcaagctggcaaacagactgagtttgtttcaaactcccatttattaacacattgttcttttgctgttgacccagctgcagcctatcttgatgctgttaaacaaggcgcaaaacctgttggcaattgtgtaaagatgttgactaatggttctggtagcggtcaggctattacttgtaccattgattccaacactacgcaggacacatatggtggcgcgtctgtttgtatttattgcagagcacatgttgcacatccaaccatggacggtttttgtcagtacaaaggcaagtgggtacaagtgcctataggtacaaatgaccctataagatcttgtcttgaaaatactgtttgtaaagtttgtggttgttggcttaatcatggctgtacatgtgaccggactgctatccaaagttttgataacagttatttaaacgagtccggggctctagtgccgctcgactagagccctgtaatggtacagacatagattactgtgtccgtgcatttgacgtttacaataaagatgcgtcttttatcggaaaaaatctgaagtccaattgtgtgcgcttcaagaatgtagataaggatgacgcgttctatattgttaaacgttgcattaagtcagttatggaccacgagcagtccatgtataacttacttaaaggctgtaatgctgttgctaagcatgatttctttacttggcatgagggcagaaccatttatggtaatgttagtagacaggatcttactaaatacaccatgatggatttgtgcttcgctctgcgtaactttgatgaaaaagactgtgaagtttttaaggagatattggttcttactggttgttgtagtactgattactttgaaatgaagaattggtttgaccccatagaaaatgaggacatacaccgtgtgtatgctgctttaggtaaggtagttgcaaatgcaatgcttaagtgtgttgctttttgcgacgaaatggtgctcaaaggagttgttggtgttttgaccttagacaaccaagatcttaatgggaatttctatgacttcggtgactttgtattgtgtcctcctggaatgggaataccctactgcacgtcatactattcttatatgatgcctgttatgggtatgactaattgtttagctagtgagtgctttatgaaaagtgacatctttggtcaagacttcaaaacttttgatttgttgaaatatgatttcacagaacataaggaggttttgtttaacaagtactttaagtattggggacaggattatcatcctgattgtgttgattgccatgacgagatgtgtattttgcattgttcaaattttaacacactcttcgcaaccacaattccaaacacggcttttggacctctatgcagaaaagtgtttattgatggtgtacccgtagttgctactgctggttaccactttaaacaattaggacttgtgtggaacaaagatgttaacactcattctaccagacttactattactgaactcttacagtttgtgacagatccaacgcttatagttgcgtcatcgcctgccttggtggataaacgcactgtttgtttttctgtcgctgctttgagtacaggattaacatcccaaacagtaaaacctggccattttaataaggagttttatgacttcttacgttctcaggggtttttcgatgagggttcagaattaacattgaagcatttcttttttacacaaaagggtgatgctgcaattaaagattttgattattatcgttacaacagacctactatgctggatattggacaagctcgcgtacgatatcaagtggcagctcgctattttgactgttacgagggtggctgtattacatctagagaggttgttgttacaaaccttaataaaagcgctggttggccccttaataagtttggtaaagctggtttatattatgagtctattagttatgaggaacaagatgctattttttcattaacaaagcgtaatattctccctactatgactcagttaaatcttaaatacgccatatctggtaaggaacgcgcacgtacagtgggtggcgtctctttattagctactatgactacaagacagtttcatcagaaatgtctgaaatccatagtagctaccagaaatgccaccgttgttatcggcactaccaagttttatggcgggtgggataatatgttaaagaacctgatggccgatgttgatgatcctaaattgatgggatgggactatcctaagtgtgatagagctatgccctcaatgattcgtatgttgtcggctatgatcttaggttctaagcatgtcacatgttgtacggctagtgctaaattttatagacttagtaatgagcttgctcaagttttgaccgaggttgtttattcaaatggtgggttttattttaaacctggtggtacaacttctggtgatgcaactacagcctacgccaattctgtctttaatatatttcaggctgtaagttctaacattaattgcgttttgagcgttaactcgtcaaattgcaataattttaatgttaagaagttacagagacaactttatgataattgctatagaaatagtaatgttgatgaatcttttgtggatgacttttatggttatttgcaaaagcatttttctatgatgattctttctgatgatagtgttgtgtgctataataaaacttatgctggacttggttacattgctgatattagtgcttttaaagccactttgtattatcagaatggtgtgtttatgagtacagctaagtgttggactgaggaagatctttctataggacctcatgaattttgctcacagcacactatgcagattgtagatgaaaatggtaagtattatctaccatatccagatcctagccgtattatttctgctggtgtttttgtggatgacatcactaagactgatgctgtcattcttttggaacgctatgtttctctggctatagatgcctacccattgtctaagcatcctaaacctgagtacaggaaggtgttttacgcattgttagactgggtcaaacatctcaacaagactcttaacgaaggtgttttggagtctttttctgttacacttttagatgaacatgagtctaagttttgggatgaaagcttttatgctagtatgtatgagaagtctacagtattacaagctgctggtctttgtgtagtatgtggttctcaaacagttctaagatgcggtgattgtttacgcagaccgatgttgtgcactaagtgcgcctatgatcatgtgtttggcactgatcataagttcattttagctattacaccatatgtgtgtaacacatctggctgcaatgtaaatgacgttacaaaactgtatcttggaggtttgaattattactgtgtagaccacaaaccacatctttcattcccactgtgttcagctggtaatgtctttggtttgtacaaaagttctgctttgggttccatggacattgatgtctttaacaaactttctacctctgattggtctgacattcgcgactacaagcttgctaatgatgcaaaagagtcactaaggttgtttgcagctgaaacggtcaaggccaaagaggaaagtgttaagtcatcatacgcttatgctaccctaaaggagattgtaggtcctaaggaacttttgctcttatgggaaagtggaaaagccaaaccaccgttaaaccgtaattctgtttttacatgcttccaaattacaaaagactccaagtttcaagttggtgagtttgtgtttgagaaagtagattacggttctgatacggttacttacaaatccactgctactactaagttagtaccaggtatgttgtttattttgacttctcataatgttgctccacttagagcgccaacaatggcaaaccaggagacatattctaccatttacaagttgcacccatcatttaatgttagtgatgcttatgcaaatcttgtaccttattaccaacttattggcaaacagcgtataaccacaatacagggtcctcctggtagtggaaaatcgcattgttctattggtattggtgtgtattaccctggagcgaggatcgtgttcaccgcttgttctcacgctgctgttgattcgctctgtgcaaaagctgtcacagcctatagtgttgataagtgtacacgtattattcctgcacgtgccagagttgagtgttatagtggttttaaacctaacaataatagtgcacaatacgtgtttagtactgttaatgcgttacctgaagttaatgcagacattgttgtcgtggatgaggtgtctatgtgcactaactatgacttgtctgtgattaaccagcgtatatcatataaacacattgtatatgttggtgatcctcaacagcttccagctcctagagttcttatctctaaaggtgttatggaaccaattgactataatgttgtgacacaacgtatgtgtgctataggacccgatgtctttttacacaagtgttacagatgtcctgctgaaatagttaacactgtttcagagcttgtttatgaaaacaagtttgtacctgtcaaagaagctagtaagcagtgcttcaaaatctttgaacgcggtagtgttcaggtagacaatggctccagtataaataggcgtcaacttgatgttgttaagcgatttatacataaaaactccacatggagcaaggctgtgtttatctcaccttacaatagtcaaaattatgtagctgccaggcttttaggcttacaaactcagacagtggattctgctcaaggtagtgaatatgactatgttatattcgcacagacatcagatactgctcatgcctgtaatgccaatcgttttaacgttgccattactagagcaaagaaaggtattttctgtattatgtctgacagaactttgtttgatgcacttaagttctttgaaatcactatgacagatttacagtctgaaagtagttgtggtttgtttaaggattgtgcacgtaaccctattgatttaccaccaagtcatgccactacttatttgtcattgtctgatagatttaagactagtggtgacttggctgttcaaataggtaacaacaatgtttgtacctatgaacatgtgatttcatatatgggtttcaggtttgatgttagcatgcctggtagtcatagtttgttctgtactagagactttgccatgcgtcatgtcagaggttggttaggaatggatgtggaaggtgcacatgtcacaggtgacaatgttggcactaatgtacctctacaagttggtttttccaatggtgttgattttgtagctcaacctgaaggttgtgttctaacaaacactggcagtgttgtaaaacctgttcgtgctcgtgcaccacctggagaacaattcactcacattgtacctctgttacgcaagggacaaccttggagtgtgttgagaaaacgtattgttcaaatgatagcagattttcttgctggctcatctgatgtactggtgtttgtactttgggctggcggtttagagttgaccactatgcgttattttgttaagattggagctgttaaacattgccaatgtggtactgttgcaacatgctacaattctgttagtaatgactattgttgctttaaacatgcattgggctgtgactatgtttataatccatatgtcatagatattcaacaatggggttatgttggttcactctccactaatcaccatgcaatttgtaatgttcatagaaatgagcatgttgcttctggtgatgctattatgactagatgtttggctgtgtatgactgctttgttaagaatgtggattggtcaattacctaccctatgatagctaatgaaaatgccataaacaagggcggtcgcactgtgcagagtcatattatgcgtgctgctattaaattgtacaaccctaaagcaatccatgacattggtaatcctaagggtattcgttgtgctgtaactgatgccaagtggtattgttatgacaagaaccctattaattctaatgtgaaaacattggaggatgattacatgacacatggccaaatggatggcttgtgtttgttttggaattgtaatgtggatatgtaccctgaattctcaattgtttgcaggtttgacacacgtacacgatctacattgaaccttgaaggtgtaaatggtgggtcattgtatgtcaataatcatgcatttcacactcctgcttatgataaacgtgctatggctaaattgaaaccagcaccgtttttctactatgacgacggttcatgtgaggttgttcacgatcaagttaactatgttcctttgagagccactaattgcattaccaagtgtaatattggtggtgctgtatgttctaagcacgctaatctctatagagcatatgttgagtcatataacatttttactcaagctggttttaatatttgggttcctaccacgtttgattgttataatttgtggcagacattcacagaggtcaatttacaaggtttagagaacattgcttttaacgttgttaataaaggttcatttgttggtgctgatggtgaattaccagtagccattagtggtgataaagtgttcgtacgtgatggtaacactgataatttagtctttgttaacaaaacatcactgcctacaaacatagcatttgaactttttgctaagaggaaggttggtttaacaccacctctcagtattctcaaaaaccttggtgttgtcgccacatataagtttgtcttgtgggattatgaagctgagcgtcccttgacaagctttactaagtctgtttgtggttatacagactttgcagaggatgtttgtacttgttacgataatagtatacaaggttcatacgaacgttttactctgtcaactaatgctgtgttattctctgctactgctgtgaaaacaggtggtaagagtttgccggctattaaattgaattttggaatgcttaatggtaatgcaattgctactgtcaaatcagaagatggtaacataaaaaatattaactggtttgtttacgtacgcaaagatggcaaacctgttgatcattatgatggtttttatacccaaggtcgtaatttacaagactttttgcctcgcagcacaatggaagaagactttttgaacatggatataggcgtgtttattcaaaagtatggtctagaggatttcaacttcgagcacgttgtgtatggtgatgtttcaaaaactactctaggcggtttacacttgttgatttcacaagtacgtctgagtaaaatgggcatcttaaaggcagaggagtttgtggcagcatctgacataacactcaaatgttgtactgtgacttatcttaatgatcctagttctaagactgtttgtacttacatggatttgttgttggatgattttgtttctgtattgaagtctttggatttgactgttgtatccaaggttcatgaggtcataattgacaacaaaccatggagatggatgctatggtgtaaagataatgccgttgctacattctatcctcagttgcagagtgcagaatggaaatgcgggtattctatgcctggtatttataagacacaacgtatgtgcttagaaccatgtaatttgtataattatggtgcaggtttgaagttgcccagtggcattatgttcaatgttgttaaatacactcaattgtgtcaatattttaacagtaccacgttatgtgttcctcataatatgagagtgttacacttgggtgctggctctgattatggtgttgcaccaggaactgctgttcttaaaaggtggttgccgcacgacgcaattgttgttgacaacgatgttgttgactatgtgagtgacgctgattttagtgttactggtgattgtgcaaccgtttatttggaagacaagtttgacttgttaatctctgatatgtacgatggtaggacaaaggcaattgatggtgaaaatgtttcgaaagaaggatttttcacttacatcaatggtttcatttgtgaaaaacttgccatcggaggttcgattgctattaaagtaacagagtatagctggaataagaaattgtatgaacttgtacaaagattttctttttggactatgttttgcacttctgttaatacgtcatcatcagaagcctttgttgtcggaattaactatcttggtgatttcgcacaaggaccttttatagatggtaacataatacacgcaaattatgtattttggcgtaactccactgttatgagtttgtcctacaactctgttttagacctgagtaaatttaattgcaaacacaaagcgactgttgttgtgcaattaaaggatagtgatattaatgaaatggtgcttagtcttgttaggagtggtaagttgcttgtaaggggtaatggcaagtgtttgagttttagtaatcatttagtctcaactaaataaaatgtttgtttt

SEQ ID NO: 33 - DNA, 922 bp, Coronavirus
atttaacaaatttggaaaagccaggctctattatgaagcattatcatttgaggaacaggatgaaatttacgcttatactaagcgtaatgtcctgccaacacttactcaaatgaatttgaaatatgctattagtgctaagaatagagcccgcactgttgctggtgtttccatacttagtactatgactggcagaatgtttcatcaaaaatgtttgaaaagtatagcagctacacgtggtgttcctgtagttataggcaccactaaattttatggtggctgggatgatatgttacgccgccttattaaagatgttgacaatcctgtacttatgggttgggattatcctaagtgtgatcgtgctatgccaaacctactacgtattgttagtagtttggtattagcccgaaaacatgagacatgttgttcgcaaaggactaggttttatcgacttgcgaatgaatgcgcacaagttttgagtgaaattgttatgtgtggtggctgttattatgttaagcctggtggcactagtagtggtgatgcaactactgcttttgctaattcagtctttaacatatgtcaagctgtttcagccaatgtatgtgccttaatgtcatgcaatggcaataagattgaagatcttagtatacgtgctcttcagaagcgcttatactcacatgtgtatagaagtgataaggttgattcaacctttgtcacagaatattatgaatttttaaataagcattttagtatgatgattttgagtgatgatggggttgtgtgttataattctgattatgcgtccaaagggtatattgctaatataagtgcctttcaacaggtattatattatcaaaataacgtttttatgtcagaatccaaatgttgggttgaacatgacataaataatggacctcatgaattc

SEQ ID NO: 34 - DNA, 8473 bp, Coronavirus
tgtgaccatgctggcactggtatggccattactattaagccggaggccaaccactaatcaggattcttatggtggtgcttccgtttgtatatattgccgctcgcgtgttgaacatccagatgttgatggattgtgcaaattacgcggcaagtttgtccaagtgcccttaggcataaaagatcctgtgtcatatgtgttgacgcatgatatttgtcaggtttgtggcttttggcgagatggtagctgttcctgtgtaggcacaggctcccagtttcagtcaaaagacacgaactttttaaacggattcggggtacaagtgtaaatgcccgtcttgtaccctgtgccagtggcttggacactgatgttcaattaagggcatttgacatttgtaatgctaatcgagctggcattggtttgtattataaagtgaattgctgccgcttccagcgtgtagatgaggacggcaacaagttggataagttctttgttgttaaaagaactaatttagaagtgtataataaggagaaagaatgctatgagttgacaaaagaatgcggtgttgtggctgaacacgagttcttcacatttgatgtggagggaagtcgggtaccacacatagtccgtaaagatctttcaaagtttactatgttagatctttgctatgcattgcgtcattttgaccgcaatgattgttcaactcttaaggaaattctccttacatatgctgagtgtgaagagtcctacttccaaaagaaggactggtatgattttgttgagaatcctgatataattaatgtgtataaaaagcttggtcctatatttaatagagccctgcttaacactgccaagtttgcagacgcattagtggaggcaggcttagtaggtgttttaacacttgataatcaagatttatatggtcaatggtatgactttggagattttgtcaagacagtacctggttgtggtgttgccgtggcagactcttattattcatatatgatgccaatgctgactatgtgtcatgcgttggatagtgagttgtttgttaatggtacttatagggagtttgaccttgttcagtatgattttactgatttcaagctagagctcttcactaagtattttaagcattggagtatgacctaccacccgaacacctgtgagtgcgaggatgacaggtgcattattcattgcgccaattttaatatactttttagtatggtcttacctaagacctgttttgggcctcttgttaggcagatatttgtggatggtgttcctttcgttgtgtcgatcggttaccattataaagaattaggtgttgttatgaatatggatgtggatacacatcgttatcgcttgtctcttaaggacttgcttttgtatgctgcagaccctgcccttcatgtggcgtctgctagtgcactgcttgatttgcgcacatgttgttttagcgttgcagctattacaagtggcgtaaaatttcaaacagttaaacctggaaattttaatcaggatttttatgagtttattttgagtaaaggcctgcttaaagaggggagctccgttgatttgaagcacttcttctttacgcaggatggtaatgctgctattactgattataattattacaagtataatctacccaccatggtggatattaagcagttgttgtttgttttagaagttgttaataagtattttgagatctatgagggtgggtgtatacccgcaacacaggtcattgttaataattatgataagagtgctggctatccatttaataaatttggaaaggccaggctctattatgaggcattatcatttgaggagcaggatgaaatttatgcgtataccaaacgcaatgtcctgccgaccctaactcaaatgaatcttaaatatgctattagtgctaagaatagggcccgcaccgttgctggtgtctctattctcagtactatgactggcagaatgtttcatcaaaagtgtctaaagagtatagcagctactcgcggtgttcctgtagttataggcaccacgaagttctatggcggttgggatgatatgttacgccgccttattaaagatgttgatagtcctgtactcatgggttgggactatcctaaatgtgatcgtgctatgccaaacatactgcgtattgttagtagtttggtgctagcccgtaaacatgattcgtgctgttcgcatacggatagattctatcgtcttgcgaacgagtgcgcccaagttttgagtgaaattgttatgtgtggtggttgttattatgttaaaccaggtggcactagtagtggggatgcaaccactgcttttgctaattctgtgtttaacatttgtcaagctgtttccgccaatgtatgctcgcttatggcatgcaatggacacaaaattgaagatttgagtatacgcgagttacaaaagcgcctatactctaatgtctatcgtgcggaccatgttgaccccgcatttgttagtgagtattatgagtttttaaataagcattttagtatgatgattttgagtgatgatggtgttgtgtgttataattcagagtttgcgtccaagggttatattgctaatataagtgcctttcaacaggtattatattatcaaaataatgtgtttatgtctgaggccaaatgttgggtagaaacagacatcgaaaagggaccgcatgaattttgttctcaacatacaatgctagtcaagatggatggtgatgaagtctaccttccataccctgatccttcgagaatcttaggagcaggctgttttgttgatgatttattaaagactgatagcgttctcttgatagagcgtttcgtaagtcttgcaattgatgcttatcctttagtataccatgagaacccagagtatcaaaatgtgttccgggtatatttagaatatataaagaagctgtacaatgatctcggtaatcagatcctggacagctacagtgttattttaagtacttgtgatggtcaaaagtttactgatgagaccttttacaagaacatgtatttaagaagtgcagtgctgcaaagcgttggtgcctgcgttgtctgtagttctcaaacatcattacgttgtggcagttgcatacgcaagcctttgctgtgttgcaaatgcgcctatgatcatgttatgtccactgatcataaatatgtcctgagtgtgtcaccatatgtgtgtaattcaccgggatgtgatgtaaatgatgttaccaaattgtatttaggtggtatgtcatattattgtgaggaccataaaccacagtattcattcaaattggtgatgaatggtatggtttttggtttatataaacaatcttgtactggttcgccctacatagaggattttaataaaatagctagttgcaaatggacagaagtcgatgattatgtgctagctaatgaatgcaccgaacgccttaaattgtttgccgcagaaacgcagaaggccacagaagaggcctttaagcaatgttatgcgtcagcaacgatccgtgagatcgtgagcgatcgggagttaattttatcttgggaaattggtaaagtgagaccaccacttaataaaaattatgtttttactggctaccattttactaataatggtaagacagttttaggtgagtatgtttttgataagagtgagttgactaatggtgtgtattatcgcgccacaaccacttataagttatctgtaggtgatgtgttcattttaacatcacacgcagtgtctagtttaagtgctcctacattagtaccgcaggagaattatactagcattcgttttgctagtgtttatagtgtgcctgagacgtttcagaataatgtgcctaattatcagcacattggaatgaagcgctattgtactgtacagggaccgcctggtactggtaagtcccatctagccattgggctagctgtttattattgtacagcgcgcgtggtgtataccgctgctagccatgctgcagttgacgcgctgtgtgaaaaggcacataaatttttaaatattaatgactgcacgcgtattgttcctgcaaaggtgcgtgtagattgttatgataaatttaaggtcaatgacaccactcgcaagtatgtgtttactacaataaatgcattacctgagttggtgactgacattattgtcgttgatgaagttagtatgcttaccaactatgagctgtctgttattaacagtcgtgttagggctaagcattatgtgtatattggagaccctgcgcagttacctgcaccacgtgtgctactgaataagggaactctagaacctagatattttaattccgttaccaagctaatgtgttgtttgggtccagatattttcttgggcacctgttatagatgccctaaggagattgtggatacggtgtcagccttggtttataataataagctgaaggctaaaaatgataatagctccatgtgctttaaggtttattataagggccagactacacatgagagttctagtgctgttaatatgcagcaaatacatttaattagtaagtttttaaaggcaaaccccagttggagtaacgccgtatttattagtccttataatagtcagaactatgttgctaagagagtcttgggattacaaacccagacagtagactcagcgcagggttctgaatatgattttgttatttattcacagactgcggaaacagcgcattctgtcaatgtaaatagattcaatgttgctattacacgtgctaagaagggtattctctgtgtcatgagtagtatgcaattatttgagtctcttaattttactacactgacgttggataagattaacaatccacgattacagtgtactacaaatttgtttaaggattgtagcaggagctatgtaggatatcacccagcccatgcaccatcctttttggcagttgatgacaaatataaggtaggcggtgatttagccgtttgccttaatgttgctgattctgctgtcacttattcgcggcttatatcactcatgggattcaagcttgacttgacccttgatggttattgtaagctgtttataactagagatgaagctatcaaacgtgttagagcctgggttggcttcgatgcagaaggtgcccatgcgatacgtgatagcattgggacaaatttcccattacaattaggcttttcgactggaattgattttgttgtcgaagccactggaatgtttgctgagagagatggttatgtctttaaaaaggcagccgcacgagctcctcctggcgaacaatttaaacaccttatcccacttatgtcaagagggcagaaatgggatgtggttcgaattagaatagtacaaatgttgtcagaccacctagtggatttggcagacagtgttgtacttgtgacgtgggctgccagctttgagctcacatgtttgcgatatttcgctaaagttggaagagaagttgtgtgtagtgtctgcaccaagcgtgcgacatgttttaattctagaactggatactatggatgctggcgacatagttattcctgtgattacctgtacaacccactaatagttgacattcaacagtggggatatacaggatctttaactagcaatcatgatcctatttgcagcgtgcataagggtgctcatgttgcatcatctgatgctatcatgacccggtgtctagctgttcatgattgcttttgtaagtctgttaattggaatttagaataccccattatttcaaatgaggtcagtgttaatacctcctgcaggttattgcagcgcgtaatgtttagggctgcgatgctatgcaataggtatgatgtgtgttatgacattggcaaccctaaaggtcttgcctgtgtcaaaggatatgattttaagttttatgatgcctcccctgttgttaagtctgttaaacagtttgtttataaatacgaggcacataaagatcaatttttagatggtttgtgtatgttttggaactgcaatgtggataagtatccagcgaatgcagttgtgtgtaggtttgacacgcgtgtgttgaacaaattaaatctccctggctgtaatggtggcagtttgtatgttaacaaacatgcattccacaccagtccctttacccgggctgccttcgagaatttgaagcctatgcctttcttttattattcagatacgccctgtgtgtatatggaaggcatggaatctaagcaggtcgattatgtcccattgagaagcgctacatgcatcacaagatgcaatttaggtggcgctgtttgtttaaaacatgctgaggagtatcgtgagtaccttgagtcttacaatacggcaaccacagcgggttttactttttgggtctataagacttttgatttttataacctttggaatacttttactaggctccaaagtttagaaaatgtagtgtataatttggtcaatgctggacactttgatggccgggcgggtgaactgccttgtgctgttataggtgagaaagtcattgccaagattcaaaatgaggatgtcgtggtctttaaaaataacacgccattccccactaatgtggctgtcgaattatttgctaagcgcagtattcggccccaccccgagcttaagctctttagaaatttgaatattgacgtgtgctggagtcacgtcctttgggattatgctaaggatagtgtgttttgcagttcgacgtataaggtctgcaaatacacagatttacagtgcattgaaagcttgaatgtactttttgatggtcgtgataatggtgctcttgaagcttttaagaagtgccggaatggcgtctacattaacacgacaaaaattaaaagtctgtcgatgattaaaggcccacaacgtgccgatttgaatggcgtagttgtggagaaagttggagattctgatgtggaattttggtttgctgtgcgtaaagacggtgacgatgttatcttcagccgtacagggagccttgaaccgagccattaccggagcccacaaggtaatccgggtggtaatcgcgtgggtgatctcagcggtaatgaagctctagcgcgtggcactatctttactcaaagcagattattatcctctttcacacctcgatcagagatggagaaagattttatggatttagatgatgatgtgttcattgcaaaatatagtttacaggactacgcgtttgaacacgttgtttatggtagttttaaccagaagattattggaggtttgcatttgcttattggcttagcccgtaggcagcaaaaatccaatctggtaattcaagagttcgtgacatacgactctagcattcattcgtactttatcactgacgagaacagtggtagtagtaagagtgtgtgcactgttattgatttattgttagatgattttgtggacattgtaaagtccctgaatctaaagtgtgtgagtaaggttgttaatgttaatgttgattttaaagatttccagtttatgttgtggtgcaatgaggagaaggtcatgactttctatcctcgtttgcaggctgctgctgactggaaacctggttatgttatgcctgtcttatataagtatttggaatcgcctctggaaagagtaaacctctggaattatggcaagccgattactttacctacaggatgtatgatgaatgttgctaagtatactcaattatgtcaatatttgagcactacaacattagcagttccggctaatatgcgtgtcttacaccttggtgccggttcggataagggtgttgcccctgggtctgcagttcttaggcagtggctaccagcgggaagtattcttgtagataatgatgtgaatccatttgtgagtgacagtgtcgcctcatattatggaaattgtataaccttaccctttgattgtcagtgggatctgataatttctgatatgtacgaccctcttactaagaacattggggagtacaacgtgagtaaagatggattctttacttacctctgtcatttaattcgtgacaagttggctctgggtggcagtgttgccataaaaataacagagttttcttggaacgctgagttatatagtttaatggggaagtttgcgttctggacaatcttttgcaccaacgtaaacgcctcttcaagtgaaggatttttgattggcataaattggttgaataagacccgtaccgaaattgacggtaaaaccatgcatgccaattatctgttttggagaaatagtacaatgtggaatggaggggcttacagtctctttgacatgagtaagttccctttgaaagcggctggtacggctgttgttagccttaaaccagaccaaataaatgacttagtcctctccttgattgagaagggcaagttattagtgcgtgatacacgcaaagaagtttttgttggcgatagcctagtaaatgtcaaataaatctatacttgtcgtggctgtgaaaatg

SEQ ID NO: 35 - DNA, 21798 bp, Coronavirus
tataagagtgattggcgtccgtacgtaccctctctactctaaaactcttgtagtttaaatctaatctaatctaaactttataaacggcacttcctgcgtgtccatgcccgtgggcctggtcttgtcatagtgctgacatttgtggttccttgactttcgttctctgccagtgacgtgtccattcggcgccagcagcccacccataggttgcataatggcaaagatgggcaaatacggtctcggcttcaaatgggccccagaatttccatggatgcttccgaacgcatcggagaagttgggtaaccctgagaggtcagaggaggatgggttttgcccctctgctgcgcaagaaccgaaagttaaaggaaaaactttggttaatcacgtgagggtggattgtagccggcttccagccttggagtgctgtgttcagtccgccataatccgtgatatttttgttgacgaggatccccagaaggtggaggcctcgactatgatggcattgcagttcggtagtgctgtcttggtcaagccatccaagcgcttgtctgttcaggcatgggctaagttgggtgtgctgcctaaaactccggccatggggttgttcaagcgcttctgcctgtgtaacaccagggagtgcgtttgtgacgcccacgtggcctttcaactttttacggtccagcccgatggtgtatgcctgggtaacggccgttttataggctggttcgttccagtcacagccataccggagtatgcgaagcagtggttgcaaccctggtccatccttcttcgtaagggtggtaacaaagggtctgtgacatccggccatttccgccgcgctgttaccatgcctgtgtatgactttaatgtagaggatgcttgtgaggaggttcatcttaacccgaggggtaagtactcctgcaaggcgtatgctcttcttaggggctatcgcggtgttaagcccatcctgtttgtggaccagtatggttgcgactatactggatgtctcgccaagggtctcgaagactatggcgaccttactttgagtgagatgaaggagttgtcccctgtgtggcgtgactccttagataatgaagttgttgtggcttggcatgttgatcgtgaccctcgagctgtgatgcgcctgcagactctggctactgtacgtagcattgagtatgtgggccaaccgatcgaggatatggttgatggggatgtggtgatgcgtgaacccgctcacctcctcgcgcccaatgccattgttaaaaggcttccccgtctggtggagactatgctgtatacggattcttccgttacagagttttgttataaaactaagttgtgtgattgtggttttatcacacagtttggctatgttgattgctgtggtgacacctgtggttttcgtgggtgggttcctggcaatatgatggatggctttccatgccctgggtgttgtaaaagttacatgccttgggagttggaagctcaatcatcgggtgttataccagaaggaggtgttctatttacgcagagcactgacacagtgaatcgtgagtcttttaagctctacggtcatgctgttgtgccttttggtggtgctgcgtattggagtccatatcctggtatgtggcttccagtaatttggtcttctgttaagtcatattcctatttgacttatacaggagttgttggttgtaaggcaattgtccaggagacagacgctatatgtcgttttctgtacatggactatgtccagcacaagtgtggcaatctcgagcagagggctatccttggattggacgatgtctatcatagacagttgcttgttaacaggggtgactatagtctcctccttgaaaatgtggatttgtttgttaagcggcgcgctgaatttgcttgcaaattcgccacctgtggagatggccttgtaccccttctactagatggtttagtgccccgcagttattatttaattaagagtggtcaagcttttacctcattgatggttaactttagccgagaggtagttgacatgtgtatggacatggctttattgttcatgcatgatgttaaagtggccactaagtatgttaagaaggttactggcaaagtagcagtgcgctttaaagcgttaggcattgctgttgtcagaaaaattactgaatggtttgacttagccgtggacactgctgctagtgccgctggatggctttgctaccagctggtaaatggcttatttgcagtagccaatggtgttataacctttatacaggaggtgcctaactatcaagaatttattaacaatcagcatttcaattcacacctgcatccgcctgagcttgtcaagaattttgttgacaagttcaagacatttttcaaggtcttgatcgactctatgtcggtctctatcttgtctggacttactgttgtcaagactgcctcaaatagggtatgtcttgctggcagtaaggtttatgaagttgtgcagaaatctctgcctgcatatattatgcctgtgggttgcagcgaagccacttgtttggtgggtgagattgaacctgcagtctttgaagatgatgttgttgatgtggttaaagccccgttaacatatcaaggctgttgtaagccaccctcttctttcgagaagatttgtattgtggataaattatatatggccaagtgtggtgatcaattctaccctgtggtggttgataacgacactgttggcgtgttagatcagtgctggaggttcccctgcgcgggcaagaaagtcgtgtttaacgacaagcctaaagttaaggaggtaccctccacgcggaagattaagattatcttcgctctggatgcgacctttgatagtgttctctcgaaggcatgttcagagtttgaagttgataaagatgttacattggatgagctgcttgatgttgtgcttgacgcagttgagagtacgctcagcccttgtaaggagcatggtgtgataggcacaaaagtttgtgctctacttaaaggttggtggacgattatgtctatctttttgatgaaggaggcgaagaagttattgccctcccgtatgtatgtcctctctgctcctgatgaagactgcgttgcaacagatgttgtatatgcagatgaaaaccaagatgatgatgctgacgatcctgtagtccttgtcgccgatacccaagaagaggacggcgttgccagggagcaggttgattcggctgattcggaaatttgtgttgcgcacactggtggtcaagaaatgactgagcctgatgtcgtcggatctcaaactcccatcgcctctgctgaggaaaccgaagtcggtgaggcatgcgacagggaagggattgctgaggtcaaggcaactgtgtgtgctgatgctttagatgcctgccccgatcaagtggaggcatttgatattgaaaaggttgaagactctatcttaagtgagcttcaaaccgaacttaatgcgcccgcggacaagacctatgaggatgtcttggcattcgatgccatatactcagagacgttgtctgcattctatgctgtgccgagtgatgagacgcactttaaagtgtgtggattctattcgccagctatagagcgtactaattgttggctgcgttctactttgatagtaatgcagagtttacctttggaatttaaagacttggggatgcaaaagctctggttgtcttacaaggctggctatgatcaatgctttgtggacaaactagttaagagcgcgcccaagtctattattcttccacaaggtggctatgtggcagattttgcctattttttcctaagccagtgtagcttcaaagttcatgctaactggcgttgtctaaagtgtggcatggagttaaagcttcaaggcttggacgccgtgtttttctatggagacgttgtgtctcatatgtgtaagtgtggtaatagcatgaccttgttgtctgcagatataccttacacattcgattttggagtgcgagatgacaaattttgtgctttttacacgccgagaaaagtctttagggctgcttgtgcggttgatgttaatgattgccactctatggctgttgtggatggcaagcaaattgatggtaaagttgttaccaaatttaatggtgacaaatttgattttatggtgggtcatggtatgacatttagtatgtctccctttgagatcgcccagttatatggttcatgtataacaccaaatgtttgttttgttaaaggagatgttataaaggttttgcgcagagttggtgctgaagtcatcgtcaaccctgctaatgggcgcatggctcatggtgcgggtgttgcaggtgctatagctaaagcagcgggcaaagcttttattaatgagactgccgatatggtgaaggctcagggcgtttgccaggttggtggatgctatgagtctaccggtggtaaattatgtaagaaagtgcttaacattgtaggaccagatgcgcgagggcatggcaacgaatgctattcacttttagagcgtgcttatcagcatattaataagtgtgacaatgttgtcaccactttaatttcggctggtatatttagtgtgcctactgatgtttccttaacttatctacttggtgtagtgacgaagaatgtcattcttgtcagtaataaccaggatgattttgatgtgatagagaagtgtcaggtgacctccgttgctggtaccaaagcgctatcatttcaattggccaaaaatttgtgccgtgatgtaaagtttgtgacgaatgcatgtagttcgctctttagtgaatcaagctttgtctcaagctatgatgtgttgcaggaagttgaagcgctggacatgatatacaattggatgatgatgctcgtgtctttgtgcaggctaatatggactgtctgcccacagactggcgtcttgtcaataaatttgatagtgttgatggtgttaagaaccattaagtattttgaatgtccgggcgaggtttttgtatctagccagggcaaaaagtttggttatgttcagaatggttcatttaaggaggcgagtgttagccaaataagggctttgcttgctaataaggttgatgtcttgtgtactgttgatggtgttaacttccgctcctgctgtgttgcagagggtgaagtttttggcaagacattaggttcagttttttgtgatggtataaatgtaaccaaagttaggtgtagtgccattcacaagggtaaggttttctttcagtatagtggtctgtctgcggcagatctcgctgctgttaaagatgcctttggttttgatgaaccacaactgctgcagtactacagtatgcttggcatgtgtaagtggccagtagttgtttgtggcaattattttgcttttaagcagtcaaataataattgctatataaatgtggcatgtttaatgctgcaacacttgagtttaaagtttcctaagtggcaatggcggaggcctggaaatgagttccgctcaggtaagccactaaggttcgtgtccttggtcttagcgaagggcagctttaaatttaatgaaccttctgattcaactgattttatacgtgtggagctgcgcgaagcggatttgagtggtgccacatgtgatttggaatttatttgtaaatgtggtgtgaagcaagagcagcgcaaaggtgttgacgctgttatgcattttggtacattggataaaagtggtcttgtcaagggttataatatcgcatgtacatgcggtgataaacttgtgcattgcactcaatttaatgtaccatttttaatctgctccaacacgcctgagggcaagaaattgcctgacgatgttgttgcagctaacatatttactggtggtagtgtgggccactacacgcatgtgaaatgtaaacccaagtaccaactttatgatgcttgtaatgttagtaaggtttctgaggcgaagggtaattttaccgattgcctctaccttaaaaatttaaagcaaactttttcgtccgtgttgacgacttattatttagatgatgtaaagtgtgtggcgtataagccagatttatcgcagtattactgtgagtctggaaaatattatacaaaacccattattaaggctcagtttagaacgtttgagaaggttgagggtgtctacactaattttaaattggtgggacatgatatagccgaaaaactcaatgctaagctgggatttgattgtaattctccttttatggagtataaaattacagagtggccaacagctactggagatgtggtgttggctagtgatgatttgtatgtgagtcggtattcaggcgggtgcgttacttttggtaaaccggttatctggcgtggccatgaggaagcatcgctgaaatccctcacatattttaatagacctagtgtcgtttgtgaaaataaatttaatgtgttgcctgttgatgtcagtgaacccacggataggggcctgtgccgtctgcagtccttgttaccggtgctgcgagtggtgctggcgtcagctatatccattgagcccggtactgccaaggagcaaaaggcgtgtgcttctgatagcgtggaggatcagattgttatggaggcccagaagaagtcatctgtcacaaccgttgctgtcaaagaggttaaattgaatggtgttaagaagcctgttaagtggaactgtagtgtggttgttaatgaccccactagcgaaaccaaagttgttaaaagtttgtctattgttgatgtgtatgatatgttcctgacagggtgtaggtatgtggtctggacggctaatgagctgtctcgattaataaattcacctactgttagagagtatgttaagtggggtatgtcgaagttaatcatccccgctaatttgttattgttaagagatgagaagcaagagtttgtagcgccaaaagtggtcaaagcgaaagctattgcctgctatggcgctgtgaagtggtttctcctctattgttttagttggataaagtttaatactgataataaggttatatacaccacagaagtagcttcaaagcttacttttaagttatgctgtttggcctttaagaatgccttacagacgtttaattggagcgttgtgtctaggggtttcttcctagtggcaacggtctttttattatggtttaattttttgtatgccaatgttattttgagtgacttttatttgcctaatattggacctctccctatgtttgtggggcagattgttgcttgggttaagactacatttggtgttttaaccatctgcgatttttaccaggtgacagatttaggctataggagttcgttttgtaatggaagtatggtctgtgaactatgcttctctggttttgatatgctggacaactatgagtccataaatgttgttcaacatgttgtagataggcgtgtgtcttttgactacattagcctatttaaattagtagtcgaacttgttatcggctactctctatatactgtgtgcttctacccactgtttgtccttgttggaatgcagttgttgaccacatggttgcctgaattctttatgctggggactatgcattggagcgctcgtttgtttgtttttgttgctaacatgctcccagcttttacgttactgcgattttatatcgtggtgacagctatgtataaggtctattgtctttgtagacatgttatgtatggatgtagtaagcctggttgcttgttttgttataagagaaaccgtagtgtccgcgttaagtgtagcaccgttgttggtggttcactacgctattacgatgtaatggctaacggcggcacaggtttctgtacaaagcaccagtggaactgtcttaattgcaattcctggaaaccaggcaatacattcataactcatgaagcagcagcggacctctctaaagagttgaaacgccctgtgaatccaacagactctgcttattactcggtcatagaggttaagcaggttggttgttccatgcgtctgttctatgagagagacggacagcgtgtttatgatgatgttagtgctagtttgtttgtggacatgaatggtctgctgcattctaaagttaaaggtgtgccagaaactcatgttgtagtcgttgagaacgaagccgataaggccggttttcttaacgctgctgttttctatgcacaatctctttatagaccgatgctgatggtggagaagaagttaataactaccgccaacactggtttgtctgttagtcgaactatgtttgacctctatgtatactccttgctgaggcaccttgacgtcgatcgcaagagcctaacaagctttgtaaatgctgcgcacaactccctaaaggagggtgttcagcttgaacaggtaatggatacctttgttggctgtgctcgacgtaagtgtgctatagattctgatgttgagaccaagtctattaccaagtccgttatggcggcagtgaatgctggcgttgaggttacggacgagagttgtaataacttggtgcccacatatgttaaaagcgacactatcgttgcagctgatttgggtgttcttattcagaataatgctaagcatgtacagtctaatgttgctaaagccgctaatgtggcttgcatttggtctgtggatgcttttaaccagctatctgctgatttgcagcataggttgagaaaagcatgtgtaaagactggcttgaagattaagcttacgtataacaagcaggaggcaaatgttcctattttaactacaccgttctcccttaaagggggcgctgtgtttagtagagttttgcaatggttgtttgttgctaatttgatctgtttcattgtattgtgggcccttatgccgacatacgcagtgcacaaatcagatatgcagttgcctttatatgccagtttcaaagttatagataatggtgtgctaagggatgtgtctgttactgacgcatgcttcgcaaacaaatttaatcaatttgatcagtggtatgagtctacatttggtcttgtctattaccgtaactctaaggcttgccctgttgtggttgctgttatagatcaagacattggccataccttatttaatgttcctaccaaagttttaagatatggatttcatgtgttgcattttataactcatgcatttgctactgatagggtgcagtgttatacgccacatatgcaaatcccctatgataatttctatgctagtggttgcgtgctgtcttccctctgtaccatgcttgcgcatgcagatggaaccccgcatccttattgttatacagagggtgttatgcataatgcttctctgtatagttctttggtccctcatgtccgttataacctagctagttcaaatggttatatacgttttcctgaagtggttagtgagggtattgtgcgtgtagtgcgcacgcgctccatgacctactgcagggttggtttatgtgaggaggctgaggagggtatttgttttaattttaatagttcatgggtactgaataacccgtattatagggctatgccaggaactttctgtggtagaaacgcttttgatttaatacatcaagttttaggaggtttagtccagcctattgatttctttgccttaacggcgagttcagtggctggcgctatccttgcaattattgttgttttggcgttttattatttaataaagcttaaacgtgcctttggtgactacactagtgttgtagtcatcaatgtcattgtgtggtgtataaatttcctgatgctattcgtgtttcaggtttatcccactttgtcttgtttgtatgcttgcttttacttttacacaacgctctatttcccttcggagataagtgttgttatgcatttgcagtggcttgtcatgtatggtgctattatgcccttgtggttttgcattacctacgtggcagtcgttgtctcaaaccatgctttgtggttgttctcttactgccgcaaaatcggtaccgatgttcgtagtgatggcacatttgaggaaatggcccttactacctttatgattactaaagaatcttattgtaagttgaaaaattctgtttctgatgttgcttttaacaggtacttgagtctttataacaagtatcgctattttagtggcaaaatggatactgctacttatagagaggctgcttgttctcaactagcaaaggcaatggaaacatttaaccataacatggtaatgatgttctctatcagctcactgctctgtactacatcatttttacagtctggtatagtgaagatggtgtcccccacttctaaggtggaaccttgtgtagttagtgttacctatggtaatatgacacttaatgggttgtggttggatgataaagtttattgtccaagacatgttatctgttcttcagctgacatgacagaccctgattatcctaatttgctttgtagagtgacatcaagtgacttttgtgttatgtctgaccgtatgagccttaccgtgatgtcttaccaaatgcagggcagtctacttgtgttgactgtaacattgcaaaatcctaacacgcctaagtattcctttggcgttgttaagcctggtgagacgtttaccgttttggctgcatacaatggcagaccccagggagccttccatgttgttatgcgtagcagccataccataaagggctcctttttgtgtggatcctgcggttctgtagggtatgtgttaactggtgatagtgtacgatttgtttatatgcatcagctagagttgagtactggttgtcacaccggtactgactttagtgggaatttctatggtccctatagagatgctcaggttgtacaattgccagttcaagattatacgcagactgttaatgttgtagcttggctttatgctgctattcttaacaggtgcaattggtttgtgcaaagtgatagttgttctctggaagaatttaatgtctgggctatgaccaatggttttagctcaatcaaagctgaccttgtcttggatgcccttgcctctatgacaggtgtcacagttgaacaggtgttggccgctattaagaggctgcattctggattccagggtaaacaaattttaggtagttgtgtgcttgaagatgagttgacaccaagtgatgtttatcaacaactagctggtgttaagctacagtcaaagcgcacaagagttattaaaggtacatgttgctggatattggcttcaacatttttgttttgtagcattatctcagcatttgtaaaatggactatgtttatgtatgttactactcatatgttgggagtgacattgtgtgcactttgttttgtaatctttgctatgttgttgattaagcataagcatttgtatttaaccatgtatattatgcctgttttatgcacattgttttacacgaactatttggttgttgggtataaacagagttttagaggcttagcatatgcttggctttcatactttgtccctgccgtagactatacttacatggatgaagtattatatggtgtcgtgttgctagtcgctatggtatttgttaccatgcgcagcataaatcacgacgtcttttctactatgttcttggttggtagacttgtcagcctggtatctatgtggtattttggagccaatttagaggaagaggttctgttgttcctcacatccctatttggcacgtacacatggactactatgctgtcattggctactgctaaggttattgctaaatggttggctgtgaatgtcttgtatttcacagacataccgcaaattaaattagttctcttgagctatttgtgtattggttatgtgtgttgttgttattggggcgtcttgtcactccttaatagcatttttaggatgccattgggcgtctacaattataaaatctccgtgcaggagttacgttatatgaatgctaatggcttgcgcccacccagaaatagttttgaagccttgatgcttaattttaagctgttgggaattggtggtgtgccagtcattgaagtatctcaaattcaatcaagactcactgatgttaaatgtgctaatgttgtgttgcttaattgcctccagcacttgcacattgcatctaattctaagttgtggcagtattgcagtactttgcataatgaaatattagccacatctgatttgagcgtagccttcgataagttggcccagctcttagttgtcttatttgctaatccagcagcagtggatagcaagtgccttgcaagtattgaagaagtgagcgatgattacgttcgcgacaatactgttttgcaagctttacagagtgaatttgttaatatggctagcttcgttgagtatgagcttgctaagaagaacttagatgaggccaaggctagcggctctgctaatcaacagcagattaagcagctagagaaggcttgtaatattgctaagtcagcatacgagcgcgatagagctgttgctcgtaagctagagcgtatggctgatttggctcttactaatatgtacaaggaagctagaattaatgataagaagagtaaggtagtgtcggcattgcaaaccatgctgtttagtatggtccgtaagctagacaaccaagctcttaattctatcttagataatgcagttaagggttgtgtacctttgaatgcaataccaccattgacttcaaacactctgactataatagtgccagataagcaggtttttgatcaagttgtggataatgtgtatgtcacctatgctcccaatgtatggcatatacaatctattcaagatgctgatggtgctgttaaacaattgaatgagatcgacgttaattcaacctggcccctagtcatctctgcaaataggcataatgaagtgtctacggtcgttttgcagaacaatgagttgatgcctcagaagttgagaactcaggtcgtcaatagtggctcagatatgaattgtaatattcctacccagtgttattataatacgactggcacgggtaagattgtgtatgctatacttagtgactgtgacggtctcaagtacactaagatagtaaaagaagatggaaattgtgttgttttggaattggatcctccctgtaagttttcagttcaggatgtgaagggccttaaaattaagtacctttactttgtgaaggggtgtaatacactggctagaggctgggtcgtaggcaccttatcatcgacagtgagattgcaggcaggcacggcaactgagtatgcctccaactctgcaatactgtcgttgtgtgcgttttctgtagatcctaagaaaacgtacctggattatatacaacagggtggcgtgcctgtcactaattgtgtcaaaatgttatgtgaccatgcaggcactggtatggccattactattaagccggaggcaaccactaatcaggattcatatggtggtgcttctgtttgtatatattgccgctcacgtgttgaacatccagatgttgatggattgtgcaaattacgcggcaagtttgttcaagtgcccttaggcataaaggatcctgtgtcatatgttttgacgcatgatgtttgtcaagtttgtggcttttggcgagacggtagctgctcctgtgtaggtacaggctcccagtttcagtcaaaagacacgaattttttaaacgggttcggggtacaagtgtaaatgcccgtcttgtaccctgtgccagtggcttggacactgatgttcaattaagggcatttgatatttgtaatgctaatcgagctggcattggtttgtattataaagtgaattgcttccgatttcagcgtgtagatgaggagggcaacaagttggataagttctttgttgttaaaagaaccaatttagaagtgtataataaggagaaagaatgttatgagttgacaaaagattgtggtgttgtggctgaacacgagttcttcacatttgatgttgagggaagtcgtgtgccacacatagtccgtaaagatctttcaaagtttactatgttagatctttgctatgcattgcgtcattttgaccgcaatgattgttcaactctcaaggaaattctccttacatatgctgagtgtgatgagtcctattttcaaaagaaggactggtatgattttgttgagaatcctgatattattaatgtgtataagaagcttggtcctatatttaatagagccctgcttaacactgctaactttgcagacacgttagtggaggcaggcttagtaggtgttttaacacttgataatcaagatttatatggtcaatggtatgactttggagattttgtcaagacagtgccttgttgtggtgttgccgtggcagattcttattattcctatatgatgccaatgctgaccatgtgtcatgcgttggatagtgagttgtttgtcaatggtacttatagggagtttgaccttgttcagtatgattttactgatttcaagctagagctctttaataagtattttaagcattggagtatgacctaccacccgaacacctccgagtgcgaggatgacaggtgcattatccattgtgccaattttaatatactttttagtatggtcttacctaagacctgttttgggcctcttgttaggcagatatttgtggatggtgttcctttcgttgtgtcgattggctaccattataaagaattaggtgttgttatgaatatggatgtggatacacatcgttatcgcttgtctcttaaagacttgcttttgtatgctgcagatcctgcccttcatgtggcatctgctagtgcactgcttgatttgcgcacatgttgttttagcgttgcagctatcacaagtggcgtaaaatttcaaacagttaaacctggaaattttaatcaggatttttatgagtttattttgagtaaaggcctgcttaaagaagggagctccgttgatttgaagcacttcttctttacgcaggatggtaatgctgctattactgattataattattacaagtataacctacccaccatggtggatattaagcagttgttgtttgttgtggaagttgttaataagtattttgagatctatgagggtgggtgtatacccgcaacacaggtcattgttaataattatgataagagtgctggctacccatttaacaaatttggaaaggccaggctctattatgaggcattatcatttgaggagcaggatgaaatttatgcgtataccaaacgcaatgtcctgccgaccctaactcaaatgaatcttaaatatgctattagtgctaagaatagggcccgcaccgttgctggtgtctctattctcagtactatgactggcagaatgtttcatcaaaagtgtttaaagagtatagcagctactcgtggtgttcctgtagttataggcaccacgaagttctacggcggttgggatgatatgttacgccgccttattaaagatgttgatagtcctgtactcatgggttgggactatcctaaatgtgatcgtgctatgccaaacatactgcgtatcgttagtagtttggtgttagcccgtaaacatgattcgtgctgttcgcatacggacagattctatcgtcttgcgaacgagtgcgcccaagttttgggtgaaattgttatgtgtggtggttgttattatgttaaaccaggtggcactagtagtggggatgcaaccactgcttttgctaattctgtatttaacatatgtcaagctgtttccgccaatgtatgctcgcttatggcatgcaatggacacaaaattgaagatttgagtatacgcgagttacaaaagcgcctatactctaatgtgtatcgtgcggaccatgttgatcccgcatttgttagtgagtattatgagtttttaaataagcattttagtatgatcattttgagtgatgatggtgttgtgtgttacaattcagagttcgcgtccaagggttatattgctaatataagtgactttcaacaggtattatattaccaaaataatgtgttcatgtctgaggccaaatgttgggtcgaaacagacatcgaaaagggaccgcatgaattttgttctcaacatacaatgctagtaaagatggatggtgatgaagtttaccttccatatcctgatccttcgagaatcttaggagcaggctgttttgttgatgatttattaaagactgatagcgttctcttgatagagcgctttgtaagtcttgcaattgatgcttatcctttagtataccatgagaacccagagtatcaaaatgtgttccgggtatatttagaatatataaagaagctgtacaatgatctcggtaatcagatcctggacagcatcagtgttattttaagtacttgtgatggtcaaaaatttactgatgagaccttctacaagaacatgtatctaagaagtgcagtgatgcaaagcgttggggcctgcgttgtctgtagttctcaaacatctttacgttgtggcagttgcatacgcaagccattgctgtgttgcaagtgcgcttatgatcatgttatgtcaactgatcataaatatgtcctgagtgtgtcaccatatgtgtgtaattcgccgggatgtgatgtaaatgatgttaccaaattgtatctaggtggtatgtcatattattgtgaggcccataaaccacagtattcatttaaattagtgatgaatggtatggtttttggtttatacaaacaatcctgtactggttcgccctacatagaggattttaataaaatagctagctgcaaatggacggaagtcgatgattatgtgctagctaatgaatgtaccgaacgtcttaaattgtttgccgcagaaacgcagaaggccacagaggaggctttcaagcaatgttatgcgtcagcaacgatccgtgagatcgtgagcgatcgggagttaattttgtcttgggaaattggtaaagtgagaccaccacttaataaaaattatgtttttactggctaccattttactaataatggcaagacagttttaggtgaatatgtttttgataagagtgagttgactaatggtgtgtattatcgcgccacaaccacttataagttatctgtgggtgatgttttcatcttaacatcacacgcagtgtctagtttaagtgctcctacattagtaccgcaggagaattatactagcgttcgctttgctagtgcttatagtgtgcctgagacgtttcagaacaatgtgcctaattatcagcacattggaatcaagcgctattgcactgtacagggaccgcctggtactggtaagtcccatttagccattgggcatgctgtttattattgtactgctcgtgtggtgtataccgctgctagccatgctgcagttgacgcgctgtgtgaaaaggcacacaaatttttaaatattaatgactgcgcgcgtattgttcctgcaaagttgcgtgtagattgctatgataagtttaatgtcaatgacaccactcgtaagtatgtgtttactacaataaatgcattacccgagttggtgactgacattattgttgttgatgaagttagtatgcttaccaattatgagctgtctgttattaacagtcgtgttagggctaagcattatgtgtatattggagatcctgctcagctgcccgctcctcgtgtgctactgaataagggaactctagaacctagatattttaattctgttaccaagctaatgtgttgcttgggtccagatatcttcttgggtacctgttatagatgccctaaggagattgtggatacagtgtcagccttggtttataataataagctgaaggctaaaaatgataatagcgccatgtgttttaaggtctattataaaggccagactacacacgagagttctagtgctgttaatatgcagcaaatacatttaattagtaagcttttgaaggcaaaccccagctggagtaatgccgtatttattagtccttataatagtcagaactatgttgccaagagagtcctgggattacaaactcagaccgcagattcagcgcagggttctgcatatgacttcgttatttattcacagactgcgcaaacagcgcattctgtcaatgtaaatagattcaatgttgccattacacgtgctaagaagggtatcctctgtgtcatgagtagtatgcaattaattggggtttttaattttactacactgacgttggataagattaataatccacgattacagtgtactacaaatttgtttaaggattgtagcaagagctatgtaggtataccgccatgcgccttccttttggcagttgatgataaatataaggtaagtggcaatttagccgtttgccttaatgttgctgattctgctgtcacttattcgcggcttatatcactcatgggattcaagcttgacttgacccttgatggttattgtaagctgtttataacaagagatgaagctatcaaacgtgttagagcttgggtgggcttcgatgcagaaggtgctcatgcgacgcgtgatagcattgggacaaatttcccattacaattaggcttttcgactggaattgatttcgtcgtcgaggccactggaatgtttgctgagagagatggctacgtctttaaaaaggcagccgcacgagcacctcccggcgaacaatttaaacacctcgtcccacttatgtctagaggacagaaatgggacgtggttcgaattcgaatagtacaaatgctgtcagaccacctagtggatttggcagacagtgttgtacttgtgacgtgggctgccagcttcgagctcacatgtttgcgatatttcgctaaagttggaaaagaagttgtgtgtagtgtctgcaacaagcgtgcgacatgttttaattctagaactgggtactatggatgctggcgacatagttattcctgtgattacctgtataacccactaatagttgacattcaacagtggggatatacaggatctttaactagcaatcatgatcctatttgcagcgtgcataagggtgctcatgtcgcatcatccgatgctatcatgactcgatgcttagctgtccatgattgcttttgtaagtctgttaattggaatttagaataccccattatttcaaatgaggtcagtgttaatacctcctgcaggttattgcagcgcgtaatgttcagagctgcgatgctatgcaataggtatgatgtgtgttatgacattggcaaccctaagggtcttgcctgtgtcaaaggatatgattttaagttttatgatgcctcccctgttgttaagtctgttaaacagtttgtttataagtacgaggcacataaagatcaatttttagatggtttatgtatgttctggaactgcaatgtggataagtatcccgcgaatgcagttgtctgtaggtttgacacgcgagtgttaagcaaattaaatctccctggctgtaatggcggtagtctgtatgttaataaacatgcattccacaccaatccctttacgcgggctgccttcgagaatttaaagcctatgccgttcttttattattcagatacgccttgtgtgtatatggaaggcatggagtctaagcaggtcgattatgtcccactaagaagcgccacttgcattacaagatgcaatttagggggtgctgtttgtctaaaacatgctgaggagtatcgtgagtaccttgagtcttacaatacggctaccacagcgggttttactttttgggtctataagacttttgatttttacaacctttggaatacttttactaggctccaaagcttagaaaatgtagtgtacaatttggttaatgctggacactttgatggccgggcgggtgaactgccttgtgctgttataggtgagaaagtcattgccaagattcaaaatgaggatgtcgtggtcttcaaaaataacacgccattccctaccaatgtggctgtcgaattatttgctgagcgcagtattcggccccacccagagcttaagctcttcagaagttcaaatattcacgtgtgctggaatcacgtcctttgggattatgctaaggatagtgtgttttgcagttcgacgtataaggtctgcaaatacacagatttacagtgcattgaaagcttgaatgtactttttgatggtcgtgataatggtgctcttgaagcttttaagaagtgccggaatggcgtctacattaacacgacgaaaattaaaagtctgtcgatgattaaaggcccacaacgtgccgacttgaatggcgtagttgtggagaaagttggagattctgatgtggaattttggtttgctatgcgtagagacggtgacgatgttatcttcagccgtacagggagccttgaaccgagccattaccggagcccacaaggtaatccgggtggtaatcgcgtgggtgatctcagcggtaatgaagctctagcacgtggcactatctttactcaaagcagatttttgtcctctttctcacctcgatcggagatggagaaagattttatggatttagatgaagacgtgttcattgcaaaatatagtttacaggactacgcgtttgaacacgttgtttatggtagtttcaaccagaaaattattggaggtttgcacttgcttattggcttagcccgtaggccgaaaaaatccaatctggttattcaagagttcgtgccgtacgactctagcattcattcgtactttatcactgacgagaacagtggtagtagtgagagtgtgtgcactgttattgatttattgttagatgattttgtggacattgtaaagtccctgaatctaaagtgtgtgagtaaggttgttaatgttaatgttgattttaaagatttccagtttatgttgtggtgcaatgaggagaaggtcatgactttctaccctcgtttgcaggctgctgctgattggaaacctggttatgtaatgcctgtattatataagtatttggaatcgccaatggaaagagtgaatctctggaactatggcaagccgattactttacctacaggatgtatgatgaatgttgctaagtatactcaattatgtcaatatttgagtactacaacattagcggtccctgctaacatgcgtgtactacaccttggtgcagggtctgataagggtgttgcacctggatctgcagttcttaggcagtggttaccatcgggcagtattcttgtagataatgatatgaatccatttgtgagtgacagcgttgcctcatattatggaaattgtataaccttaccctttgattgtcagtgggatctgataatttctgatatgtacgaccctctcactaagaacattggggagtacaacgtgagtaaagatggtttctttacttacctttgtcatttaattcgtgacaagttggctctgggtggcagtgttgccataaaaataacagagttttcttggaacgctgagttatatagtttaatggggaagtttgcgttttggacaatcttttgtaccaacgtaaacgcctcttcaagtgaaggatttttgattggcataaattggttaaatagaacccgtaatgagattgacggtaaaaccatgcatgccaactatttgttttggagaaatagtacaatgtggaatggaggggcttatagtctttttgatatgactaagttccctttgaaagcggctggtacggctgttgttagccttaaaccagaccaaataaatgacttagtcctctccttgattgagaagggcaagttattagtgcgtgacacacgcaaagaggtttttgttggcgatagcctagtaaatgttaaataa

SEQ ID NO: 36 - DNA, 31276 bp, Coronavirus
ataagagtgattggcgtccgtacgtaccctttctactctcaaactcttgttagtttaaatctaatctaaactttataaacggcacttcctgtgtgtccatgcccgtgggcttggtcttgtcatagtgctgacatttgtggttccttggtttttgttctctgccagtgacgtgtccattcggcgccagcagcccacccataggttgcataatggcaaagatgggcaaatacggtctcggcttcaaatgggccccagaatttccatggatgcttccgaacgcatcggagaagttgggtagccctgagaggtcagaggaggatgggttttgcccctctgctgcgcaagaaccaaaaactaaaggaaaaactttgattaatcacgtgagggtggattgtagccggcttccagcattggagtgctgtgttcagtctgccataatccgtgatatttttgttgatgaggatcccttgaatgtggaggcctcaactatgatggcattgcagttcggtagtgctgtcttggtcaagccatccaagcgcttgtctattcaggcatgggctaagttgggtgtgctgcctaaaactccagccatggggttgttcaagcgcttctgcctgtgtaacaccagggagtgcgtttgtgacgcccacgtggcttttcaactttttacggtccagcctgatggtgtatgcctgggcaatggccgttttataggctggtttgtgccagtcacagccataccggcgtatgcgaagcagtggttgcaaccctggtccatccttcttcgtaagggtggtaacaaagggtctgtaacatccggccatttccgccgcgctgttaccatgcctgtgtatgactttaatgtggaggatgcttgtgaggaggttcatcttaacccgaagggtaagtactcccgcaaggcgtatgctcttcttaagggctatcgcggtgttaaatccatcctattcttggaccagtatggttgtgactatactgggcgtctcgccaagggtcttgaagactatggcgattgtactttggaagagatgaaggagttgtttcctgtgtggtgtgactccttggataatgaagttgttgtggcctggcatgttgatcgggatcctcgggctgttatgcgcttgcagactcttgctactatacgtagcattggttatgtgggccaaccgaccgaggatttggttgatggagatgtggtagtgcgtgagcctgctcatctcctagcagccaatgccatcgtcaaaaggctcccccgcctggtggagactatgctgtatacggactcttccgttacagaattttgttataaaactaagttgtgtgattgtggttttatcacgcagtttggttatgtggattgctgtggtgatgcctgcgattttcgtgggtgggttcctggcaatatgatggatggctttctttgccccggatgtagtaagagctatatgccctgggaattggaggctcaatcatctggtgtgattccaaaaggtggtgttctatttactcagagcactgacacggtgaatcgtgagtcatttaagctctacggtcatgccgttgtgccttttggttctgctgtgtattggagcccctacccaggtatgtggcttccagttatttggtcttctgttaagtcatatgctgatttgacttacacaggcgttgttggttgtaaggcaattgttcaggagacagatgctatttgccggtccctatatatggactacgttcagcacaagtgtggcaatctcgagcagagagctattcttgggttggatgatgtctaccatagacaattgcttgtaaatagaggtgactatagtctcctccttgaaaatgtagatctttttgttaagcggcgcgctgaatttgcttgtaaattcgccacctgtggagatggtcttgtacctctgctactagatggtttggtgccccgcagttattatttgattaagagtggccaagccttcacctcgatgatggttaattttagccatgaggtgactgacatgtgtatggacatggcattattgttcatgcatgatgttaaagtggccactaagtatgttaagaaggttactggcaaactagccgtgcgctttaaggcgttaggtgtagccgttgtcaggaaaattactgaatggtttgatcttgccgtggacactgctgccagtgctgctggatggctttgctaccagctggtaaatggcttatttgcagtggctaatggtggcataaccttcttaagcgatgttcctgagctggtcaagaattttgttgacaagttcaaggtattcttcaaggttttgatcgactctatgtcggtttctgtcctttctggacttactgttgtcaagactgcctctaatagggtttgtcttgctggctgtaaggtttatgaagttgtgcagaagcgtttgtctgcatatgttatgcctgtgggttgcaacgaggccacttgtttagtgggtgagattgaacctgcagttgttgaagatgatgttgttgatgtggttaaagccccattaacatatcaaggctgttgtaagccacctacttcttttgagaagatttgtgttgtggataaattgtatatggccaagtgtggtgatcaattttaccctgtggttgttgataatgacactattggcgtgttagatcagtgttggaggtttccctgcgcaggcaagaaagtcgagtttaacgacaagcctaaagtcaaggagataccctccacgcgaaagattaagatcaactttgcgttggatgcgacttttgatagtgtcctttcgaaggcgtgttcagagtttgaagttgataaagacgttacattggatgagctgcttgatgttgtgcttgatgcagttgagagtacgctcagcccttgtaaggagcatgatgtgattggcacaaaagtttgtgctttacttaataggttggcagaagattatgtctacctctttgatgagggaggcgaggaagtgattgccccaaagatgtattgttccttttctgctccagatgatgaagactgcgtcgcagcggatgttgtggatgcagatgaaaaccaaggtgacgatgctgacgattctgcagcccttgtcaccgatacccaagaagaggacggtgttgccaaggggcaggttggtgtggctgagtcggatgcccgcctcgatcaagttgaggcatttgatattgaaaaggttgaggatcccatcttgaatgagctctcggctgaacttaatgcgccagcagacaagacctatgaggatgttttggcatttgatgccatttattcagaggcattgtctgcattctatgctgtgccaggtgatgaaacgcactttaaggtgtgtggattctattcgccagctatagagcgtactaattgttggctgcgttctactttgatagtaatgcagagcttacctttagaatttaaagatttggagatgcagaagctctggttgtcgtacaaatccagttataataaggaatttgtcgacaaactagttaagagcgtgcccaagtctatcattcttccacaaggtggctatgtggcagattttgcctacttctttttaagccagtgtagctttaaagcttatgctaactggcgctgtttaaagtgtgacatggacttaaagcttcaaggcttggatgccatgttcttttatggagatgtagtatcccatgtgtgtaagtgtggtactggcatgaccttgttgtctgcagatataccttacactttgcatttcggattgcgagatgataaattttgcgccttttacacgccaagaaaagtctttagggctgcttgtgtggtagatgttaatgattgtcattccatggctgttgtggatggcaagcaaattgatggtaaagttgttaccaaatttaatggtgacaaatatgattttatggtgggtcatgggatggcatttagtatgtcagcctttgagattgcccagttatacggttcatgtataacaccaaatgtttgttttgttaaaggagatgttataaaggttttgcgcagagtgggtgctgaagtcatcgttaaccctgctaatgggcgtatggctcatggtgcgggtgttgcaggtgctatagctaaagctgcgggcaaatcttttattaaggagactgctgatatggtaaagaatcagggcgtttgccaggttggtgagtgctatgaatctaccggcggcaatttatgtaagacggtgcttaacattgtaggaccagatgcccgagggcatggcaagcaatgttactcatttttagagcgtgcttatcagcatattaacaagtgtgacgatgttgttaccactttaatatcagctggtatatttagtgtgcctactgatgtttctctgacttatttaattggtgttgtgactaagaatgttattcttgtcagcaacaacaaagatgattttgatgttatagagaagtgtcaagtgacttccattgctggcactaaagcgctctcacttcaattggctaaaaatttgtgccgagatgtaaagtttgagacaaatgcatgtgattcgctttttagtgactcctgcttcgtctcaagctatgatgtgttgcaggaggttgaattgctgcgacatgacatacagttggatgatgatgcccgtgtctttgtgcaggcccatatggacaacctgcccgctgactggcgtctcgttaataagtttgatagtgttgatggtgttagaaccgttaaatattttgagtgtccgggtgagatttttgtatctagccagggcaagaagtttggttatgttcagaatggttcatttaaagtggcaagtgttagccaaataagggctttacttgctaataaggtggatgtcttgtgcaccgttgatggtgttaacttccgctcgtgctgtgttgcagagggtgaagtttttggcaagacattaggttcagtcttttgtgatggcataaatgtcaccaaggttaggtgtagtgccattcacaagggtaaggtcttctttcagtatagtggtctgtctgcggcagatctcgttgctgttacggatgcctttggctttgatgaaccacagctgctgaagtactacaatatgctaggcatgtgtaagtggccagtagttgtttgtggcaattattttgcttttaagcagtcaaataataattgctatataaatgtggcatgtttaatgctgcaacatttgagtttaaagtttcataagtggcaatggcaggaggcctggaatgagttccgctctggtaagccactaaggtttgtgtccttggtcttggcaaagggcagctttaaatttaatgaaccttctgattcaactgattttatgcgtgtggtgctgcgcgaagctgatttgagtggtgccacatgcgattttgaatttgtttgtaaatgtggtgtaaagcaagagcagcgcaaaggtgttgacgctgttatgcattttggtacgttggataaaggtgatcttgccaagggttacactatcgcatgcacgtgcggtaataaacttgtgcattgcacccaacttaacgtaccatttttaatttgctccaacaagcctgagggtaagaaattgcctgatgatgttgttgcggctaatatttttactggtggtagtttgggacactacactcatgtgaaatgcaaacccaagtaccagctttatgatgcttgtaatgttagtaaggtctctgaggctaagggtaattttaccgattgcctctaccttaaaaatttaaaacaaactttttcgtccaagttgacgactttttatttagatgatgtaaagtgcgtggagtataatccggatttatcgcagtattactgtgagtctggaaaatattatacaaagcccatcattaaggcccagtttagaacatttgagaaggtagagggtgtctataccaattttaaattggtggggcacagcattgccgaaaaattcaatgctaagctgggatttgattgtaattctccctttacggagtataaaattacagagtggccgacagctactggagatgtggtgttggctagtgatgatttgtatgtgagccgttattcaggtggatgtgttacttttggtaagccggttatctggttgggccacgaggaagcatctctgaaatcgctcacatattttaatagacctagtgtcgtttgtgaaaataaatttaatgtgttgcctgttgatgtcagtgaacccacggataaggggcctgtgccggctgcagtccttgttaccggtgctctgagtggtgctgccactgcgcccggtactgccaaggagcaaaaggtgtgcgcttctgatagtgtggtggatcaggttgtctcggggttcttatcagacctgtctggtgcaaccgtggatgtcaaagaggttaaattgaatggtgttaaaaagcctattaaggtggaagatagtgtggttgttaatgaccccactagcgaaaccaaagttgttaaaagtttgtctattgtcgatgtgtatgatatgttcctgacagggtgtagatatgtggtctggatggctaatgagttgtcccggctagtaaattcacctactgttagggagtatgtgaagtggggtatgactaagattgtaatacccgctaaattggtgttgttaagagatgagaagcaagaatttgtagcgccaaaagtagtcaaggcgaaagttattgcctgctatagtgctgtgaagtggttcttcctctattgttttagttggataaagtttaatactgataataaggttatatacaccacagaagtagcttcaaagcttacttttaatctgtgctgtttggcgtttaagaatgccttacagacttttaattggaacgttgtgtctaggggcttcttcctagtggcaacggtctttttattatggtttaactttttgtatgccaatgttattttgagtgatttctatttgcctaatattggtttctttcctacatttgtgggtcagattgtcgcttgggttaagaccacatttggtatttttaccctctgtgatctttatcaggtgtcagatgttggctatagaagttctttttgtaatggaagtatggtctgcgaactatgcttttcaggttttgacatgttggataactatgatgctataaatgttgttcagcatgttgtggataggcgagtgtcttttgactatattagcctatttaagttagtggtcgagcttgttatcggctactctttgtataccgtgtgtttctatccactgtttggccttattggcatgcagttgctgaccacatggttaccagaattctttatgctggaaactatgcattggagcgcgcgcttctttgtgtttgttgctaatatgcttccagcttttacgttactgcggttttatatcgtggtaacagctatgtataagatcttttgtctttgtagacatgttatgtatggatgtagtagaccaggttgtttgttttgctataagagaaaccgtagtgtccgtgttaagtgtagcactgttgttggtggtacgctacgctattacgatgtaatggctaatggcggcactggtttctgtgcaaagcatcagtggaactgtcttaattgcagcgcttttggacctggcaacacattcataactcatgaagcagcggcggatctctctaaagaattgaagcgccctgttaatccaacagattctgcttactatttggtcacagaggttaagcaggtaggttgttcaatgcgtctgttctacgagagagatggacagcgcgtttatgatgatgttagtgctagtttgtttgtggatatgaatggtctgctgcattctaaggttaaaggtgtgccagaaacacatgttgtagttgttgagaacgaagctgataaggcaggttttcttaatgctgctgttttctacgcacaatccctttatagaccgatgttgctggtagagaagaaattaataactaccgccaacacgggcttgtctgtgagtcagactatgtttgacctttatgtagactcactgctgggcgtcttggacgttgatcgcaagagtctaacaagttttgtgaatgctgcgcacaattccttaaaggagggtgtgcagcttgaacaagttatggatacctttattggttgcgctcgacgtaagtgtgctatagattcagatgttgagaccaagtctattaccaagtccatcatgtcggcagtaaatgctggtgttgattttacggatgagagttgtaacaacttggtacctacatatgtgaaaagcgacactatcgtcgcagccgatttgggtgttcttattcagaataatgctaagcatgtacaggctaatgttgctaaagctgctaatgtggcttgcatctggtctgtggatgcttttaatcagctatctgctgatctgcagcataggctgagaaaggcatgttcaaaaactggcttgaagattaagcttacttataataagcaggaggcaaatgtccctattttaactacaccgttctctcttaaagggggcgctgtgtttagtaaagttttgcaatggttgtttgttgttaatttgatttgtttcattgtactgtgggctcttatgccgacatatgcagtgcacaaatcagatatgcagttgcctttatatgccagttttaaagttatagataatggtgtgctaagggatgtgaccgttacggatgcatgctttgcaaacaaatttattcaatttgatcaatggtatgagtctacgtttggtcttgtctattaccgtaactctagggcgtgtcctgttgtggttgctgtcatagaccaagatattggctataccttatttaatgttcctactaaagtcttaagatatggatttcatgtgttgcattttataacccatgcatttgctactgatagcgtgcagtgttatacgccacatatgcaaatcccctatgataatttctatgctagtgggtgtgtcttgtcttccctctgtactatgctagcgcatgcagatggcacaccgcatccttattgctatacagagggcattatgcataatgcatctctgtatgactctttggctcctcatgttcgttataacctagctaattcaaatggttatatacgctttcctgaagtggttagtgaaggcattgtgcgtattgtgcgcactcgctccatgacctactgcagggttggcttatgtgaggatgctgaggagggtgtttgttttaactttaatagttcttgggtattgaataacccgtattatagggctatgcctggaactttttgtggtaggaatgcttttgatttaatacaccaagttttaggaggtttagtgcggcccattgacttctttgccctaacggcgagttcagtggctggtgctatcctagcaattattgttgttttagctttttattatttaataaagcttaaacgtgcctttggtgactatactagcgttgtggtcatcaatgtcattgtgtggtgtataaatttcctgatgctatttgtgtttcaggtttatcccactttatcttgtttatatgcttgtttttatttttacacgacgctttatttcccctcggagataagtgttgttatgcatttgcaatggctagtcatgtatggtgctattatgcccttgtggttttgcattatatacgtggcagttgttgtttcaaaccatgcattgtggctgttctcttactgccgtaagcttggtacagaagttcgtagtgatggtacatttgaggagatgtcccttactacttttatgattactaaagaatcctattgtaagttgaaaaattctgtttctgatgttgcttttaacaggtacttgagtctctataacaagtatcggtattttagtggtaaaatggataccgcggcctatagagaggctgcttgttctcaactagcaaaggcgatggaaacatttaaccataataatggtaatgatgttctctatcagccacctacggcctctgttactacatcatttttacagtccggtatagtgaagatggtgtttcccacctctaaggtggaaccttgtgttgttagtgtcacctatggtaacatgacacttaatgggttgtggttggacgataaagtttattgtccaagacatgtcatctgctcctcagctgacatgacagaccctgattattctaatttgctttgtagagtgatatcaagtgatttttgtgttatgtctggtcgtatgagccttactgttatgtcttatcaaatgcagggcagtctacttgttttgactgttacactgcaaaatcctaacacacctaagtactccttcggtgttgttaagcctggtgagacgtttactgttttggctgcatacaacggcaaatctcaaggagccttccatgttactatgcgtagtagctataccataaagggctccttcttgtgtggatcctgcggttctgtaggatatgttttaacgggcgatagtgtacgatttgtctacatgcatcagctagagttgagtactggttgtcacaccggtactgactttagtgggaacttttatggtccctatagagatgctcaagtcgtacaattgcctgttcaagattatacgcagactgttaatgttgtagcttggctttacgctgctattcttaatagatgcaattggtttgtgcaaagtgatagttgttccctggaagagtttaatgtttgggctatgaccaatggttttagttcaattaaagccgaccttgttctagatgctcttgcgtctatgacaggtgttacagttgaacagatcttggctgctattaagcggctgtattctggctttcagggtaaacaaattttaggtagttgtgtgcttgaggatgagctgacgccaagcgatgtttatcaacaactagctggtgttaagttacagtcaaagcgcacaagagttgttaaaggtacatgttgctggatattggcttcaacattattgttttgtagcattatctcagcatttgtaaaatggactatgtttatgtatgttactacccatatgttgggtgtgacattgtgtgcactttgctttgtgagctttgctatgctgttggttaagcataagcatttgtatttaactatgtttattatgccggttttgtgcacattgttttacacgaactatttagttgtgtataaacagagttttagaggcctagcttatgcatggctttcacactttgtccctgctgtagattatacatacatggatgaagttttatatggtgtcgtgttgctagtagctatggtttttgttaccatgcgcagcataaatcacgatgtcttctctgttatgttcttggttggtagacttgtcagcttggtgtctatgtggtactttggggccaatttagaggaggaggtgctattgttcctcacatcactctttggcacgtatacatggactactatgctgtcattggctactgctaaggtcattgctaaatggttggctgtgaatgtcttgtacttcacagacgtaccgcaagttaaattagttcttttgagctatttgtgtattggttatgtgtgttgttgttattggggcgtcttgtcactccttaatagcatttttaggatgccgttgggtgtctataattataaaatctccgtgcaggagttacgctatatgaatgctaatggcttgcgcccgcccagaaatagttttgaagccctagtgcttaattttaaattgttgggaattggtggtgtgccagtcattgaagtatctcaaattcaatcaagattgactgatgttaaatgtgttaatgttgtgttgcttaactgcctccagcacttgcatattgcatctagttctaagttgtggcagtattgcagtactttgcataatgaaatattagctacatctgatttgagcgtggcctttgataagttggctcagctcctagtagtcttatttgctaatccagcagcagtggatagcaagtgtcttgcaagtattgaagaggtgagcgatgattacgttcgcgacagtactgtcttgcaagccctacagagtgaatttgttaatatggctagcttcgttgagtatgaacttgctaagaagaatttagatgaggccaaggctagcggctctgccaatcaacagcagattaagcaactagagaaggcttgtaatattgctaagtcagcatatgagcgcgacagagctgttgctcgcaagcttgaacgtatggctgatttggctcttacaaatatgtataaagaagctagaattaatgataagaagagtaaggtagtttctgcattgcaaaccatgctttttagtatgattcgtaagctggataaccaagctcttaattctattttagataatgcagttaagggttgtgtacctttgaatgcaataccatcattgacttcaaacactctgactataatagtgccagataagcaggtttttgatcaagttgtggataatgtgtatgtcacctatgctgggaatgtatggcatatacaatctattcaggatgctgatggcgctgttaaacaattgaatgagatagatgttaatataacctggcccctagtcattgctgcaaataggcataatgaagtgtctagtgttgttttgcagaacaatgagttgatgcctcagaagttgagaacgcaggttgtcaatagtggctcagatatgaattgtaatactcctacccagtgttattataatacgactggcatgggtaagattgtgtatgctatacttagtgactgtgatggtcttaagtacactaagatagtaaaagaagatggaaattgtgttgttttggagttggatcctccctgtaaattttcagttcaggatgtgaaggggcttaaaattaagtacctttactttgtgaaggggtgtaatacactggccagaggctgggttgttggcaccttatcctcgacagtgaggttgcaggcaggtacggcaactgagtatgcctccaactctgcaatacggtcgttgtgtgcgttttctgtagatcctaagaaaacgtacctggactatatacaacagggtggagctcccgttactaattgtgttaagatgttatgtgaccatgctggcactggtatggccattactattaagccggaggcaaccactaatcaggattcttatggtggtgcttccgtttgtatatattgccgctcgcgtgttgaacatccagatgttgatggattgtgcaaattacgcggcaagtttgtccaagtgcccttaggtataaaggatcctgtgtcatatgttttgacacatgatgtttgtcaggtctgtggcttttggcgagatggtagctgttcctgtgtaggcacaggctcccagtttcagtcaaaagacacgaactttttaaacgggttcggggtacaagtgtaaatgcccgtcttgtaccctgtgccagtggcttggacactgatgttcaattaagggcatttgatatttgtaatgctaatcgagctggcattggtttgtattataaagtgaattgttgccgttttcagcgcgcagatgaagatggcaacacgttggataagttctttgttattaaaagaaccaatttagaagtgtataataaggagaaagaatgctatgagttgacaaaagaatgtggtgttgtggctgaacacgaattcttcacattcgatgttgagggaagtcgtgtaccacacattgtacgcaaagatctttcaaagtatactatgttagacctttgctatgcattgcggcatttcgatcgcaatgattgttcaactctcaaggaaattctccttacttatgctgagtgtgatgagtcctactttcagaagaaggactggtatgattttgttgagaattctgatataattaatgtgtacaaaaagcttggacctatttttaatagggccttgcttaacactgctaagtttgcggacacattagtggaggcaggcctagtaggtgttttaacacttgataatcaagatttgtatggtcaatggtatgactttggagattttgtcaagacagtgcctggatgtggtgttgccgtggcagattcctattattcttatatgatgccaatgctgactatgtgtcatgcgttggatagtgagttgtttattaatggtacttatagggagtttgaccttgttcagtatgattttactgatttcaagttagagctctttaataagtattttaagtattggagtatgacctatcacccgaacacctgtgagtgcgaggatgacaggtgcattattcattgcgccaattttaatatactatttagtatggttttacctaagacctgttttgggcctcttgttaggcaaatctttgtagatggtgtgcctttcgttgtctcgattggctaccattataaagaattaggtgttgttatgaatatggatgtggatacacatcgttaccgcttgtctcttaaagacttgcttttgtatgcagcagatcctgcccttcatgtggcgtctgctagtgcactgcttgatttgcgcacatgctgttttagcgtagcagctattacaagtggcgtaaaatttcaaacagtcaaacctggaaattttaatcaggatttttatgagtttattttgagtaaaggcctgcttaaagaagggagctccgttgatttgaagcacttcttctttacgcaggatggtaatgctgctattactgattataattattacaagtataatctccccactatggtggatattaagcagttgttgtttgttctagaagttgttaataagtattttgagatctatgatggtgggtgtatacccgcaacacaggtcattgttaataattatgataagagcgctggctatccatttaataaatttggaaaggccagactctattatgaggcattatcatttgaggaacaggatgaagtttatgcgtacactaagcgcaacgtcctgccaacattaactcaaatgaatcttaaatatgctattagtgctaagaatagggctcgcactgttgctggtgtttccattcttagtactatgactggcagaatgtttcatcaaaagtgtttaaagagtatagcagctactcgtggtgttcctgtagttataggcaccacgaaattttatggcggttgggacgatatgttacgccgccttattaaagatgttgatagtcctgtacttatgggttgggactatcctaaatgtgatcgtgctatgccaaacatactgcgcattattagtagtttggtgttagcccgcaaacatgattcgtgctgttcgcatacagatagattctatcgtcttgcgaatgagtgcgcccaagttttgagtgaaattgttatgtgtggtggttgttattatgttaaaccaggtggcactagcagtggggatgcaaccactgcctttgctaattctgtttttaacatttgtcaagctgtctccgccaatgtgtgctcgcttatggcatgcaatggacacaaaattgaagatttgagtatacgcgagttacaaaagcgcctatactctaatgtgtatcgtgcggatcatgttgaccccgcatttgttaatgagtattatgagtttttaaataagcattttagtatgatgattttgagtgatgatggtgttgtgtgttataattcagagtttgcgtccaagggttatattgctaatataagtgcctttcaacaggtattatattatcaaaataatgtgtttatgtctgaggctaaatgttgggtcgaaacagacatcgaaaagggaccacatgaattttgttctcaacacacaatgctagtaaagatggatggtgatgaagtctaccttccatatcctgatccttcgagaatcttaggagcaggctgttttgttgatgatttattaaagactgatagcgttctcttgatagagcgattcgtaagtcttgcaattgatgcttatcctttagtataccatgagaacccagagtatcaaaatgtgttccgggtatatttagaatatataaagaagctgtacaacgatctcggtaatcagatcttggacagctacagtgttattttaagtacttgtgatggtcaaaagtttactgatgagaccttttacaagaacatgtatttaagaagtgcagtgatgcaaagcgtcggtgcctgcgtcgtctgtagctcccaaacatcattacgctgtggcagttgcatacgcaagccattgctgtgttgcaagtgcgcttatgatcatgttatgtctactgatcataaatatgtcctgagtgtgtcaccttatgtgtgtaattcgccgggatgtgatgtaaatgatgttaccaaattgtatttaggtggtatgtcatattattgtgaggaccataagccacagtattcattcaagttagtgatgaatggtatggtttttggtctatataaacaatcttgtactggttcgccctacatagaagattttaataaaatagctagctgtaaatggacagaagtcgatgattatgtgctagctaatgaatgtaccgagcgtctcaaattgtttgccgcagaaacgcaaaaggccactgaagagtcctttaagcaatgttatgcgtcagcaacgatccgtgagatcgtgagcgatcgggagttaattttatcttgggaaattggtaaagtgaggccaccacttaataaaaattatgtttttactggctaccattttacttctaatggtaagacagttttaggtgaatatgtttttgataagagtgagttgactaatggtgtgtattatcgcgccacaaccacttataagttgtctgttggtgatgtttttattttaacatcacatgcagtgtctagtttaagtgctcctacattagtaccgcaggagaattatactagcattcgctttgctagtgtttatagtgtgcctgagacgtttcagaataatgtgccaaattatcagcacattggaatgaagcgttattgtactgtacagggacctcctggtactggaaagtcccatctagccattgggctagctgtttattattgtacagcgcgtgtggtgtataccgctgctagccatgctgcagttgacgcgttgtgtgaaaaggcatataaatttttaaatattaatgactgcacgcgtattgttcctgcaaaggtgcgtgtagattgttatgataaatttaaggtcaatgacaccactcgtaagtatgtgtttactacaataaatgcattacccgagttggtgactgacattattgttgttgatgaagttagtatgcttaccaattatgagttgtctgttattaacagtcgtgttagggctaagcattatgtttatattggagatcctgctcagttgcccgcaccccgtgtgctactgaataagggcactctagaacctagatattttaattctgttaccaagctaatgtgttgcttgggtccagatattttcttgggtacctgttatagatgccctaaggaaattgtggatacagtgtcagccttggtttatcataataagctgaaggctaaaaatgataatagctccatgtgttttaaggtctattataaaggccagactacacatgagagttctagtgctgtcaatatgcagcaaatatatttaattagtaagtttttaaaggcaaaccccagttggagtaacgccgtatttattagtccttataatagtcagaactatgttgctaagagagtcttgggtttacaaacccagacagtagattcagcgcagggttctgaatatgattttgttatttattcacagactgcggaaacagcgcattctgtcaatgtaaatagattcaatgttgctattacacgtgctaagaagggtatcctctgtgtcatgagtagtatgcaattatttgagtctcttaattttagcacactgactctggataagatcaataatccacgattacagtgtactacaaatttgtttaaggattgtagcagaagctatgcaggttatcacccagctcatgcgccttcctttttggcagttgatgataaatataaggtaggtggcgatttagccgtttgccttaatgttgctgattctgctgtcacttattcgcggcttatatcactcatgggattcaagcttgacttgacccttgatggttattgtaagctgtttataactagagatgaagctatcagacgtgttagagcctgggtaggctttgatgcagaaggtgcccatgcgacgcgtgatagcattgggacaaatttcccattacaattaggcttttcgactggaattgattttgttgtcgaggccactggaatgtttgccgagagagatggctacgtctttaaaaaggcagtggcacgagcacctcccggcgaacaatttaaacacctcgtcccacttatgtctagaggacagaaatgggacgtggttcgaattcgaatagtacaaatgctgtcagaccacttagtggatttggcagacagtgttgtacttgtgacgtgggctgccagcttcgagctcacatgtttgcgatatttcgctaaagttggaaaagaagttgtgtgtagtgtctgcaacaagcgtgcgacatgttttaattctaggactgggtactatggatgctggcgacatagttattcctgtgattacctgtataacccactaatagttgatattcaacagtggggatatactgggtctttaactagcaatcatgacctcatttgcagcgtgcataagggtgctcatgtcgcatcttctgatgctatcatgacccgatgcttagctgtccatgattgcttttgcaaatctgttaattggagtttagaataccccattatctcaaatgaggttagtgttaatacctcctgcaggttattgcagcgtgtaatgtttagggctgcgatgctatgcaataggtatgatgtgtgttatgacattggcaaccctaaaggtcttgcctgtgtcaaaggctatgattttaagttttatgatgcctctcctgttgttaagtctgttaaacagtttgtttataagtatgaggcacataaagatcaatttttagatggtttatgtatgttttggaactgcaatgtggataagtatcccgcgaatgcagttgtatgtaggtttgacacgagagtgttaaacaaattaaatctccctggctgtaatggtggtagtctgtatgttaataaacatgcattccacaccagtccctttacgcgggcagccttcgagaatttgaagcctatgcctttcttttattactcagatacgccttgtgtgtatatggagggcatggagtctaagcaggtcgattatgtcccattgagaagcgccacttgcattacaagatgcaatttaggtggcgctgtttgtttaaaacatgctgaggattatcgtgagtaccttgagtcttacaatacggcaaccacagcgggttttaccttttgggtctataagacttttgatttttacaacctttggaatacttttactaggctccaaagtttagaaaatgtagtgtataatttggtaaatgctggacactttgatggacgggcgggtgaactgccttgtgccgttataggtgagaaagtcattgccaagattcaaaatgaggatgtcgtggtttttaaaaataacacgccattccctactaatgtggctgttgaattatttgctaagcgcagtattcgaccacacccagagcttaagctctttagaaatttgaatattgacgtgtgctggagtcacgtcctttgggattatgctaaggatagtgtgttttgcagttcgacgtacaaggtctgcaaatacacagatttacagtgcattgaaagcttgaatgtactttttgatggtcgtgataatggtgctcttgaagcttttaagaagtgccgggatggcgtctacattaacacgacaaaaattaaaagtctgtcgatgattaaaggcccacagcgtgccgatttgaatggcgtagttgtggagaaagttggagattccgatgtggaattttggtttgctatgcgtagagacggtgacgatgttatcttcagccgtacagggagccttgaaccgagccattaccggagcccacaaggtaatccgggtggtaatcgcgtgggtgatctcagcggtaatgaagctctagcacgtggcactatctttactcaaagcagatttttgtcctctttcgcacctcgatcagagatggagaaagactttatggatttagatgaagacgtgttcattgcaaaatatagtttacaggactacgcgtttgaacatgttgtttatggtagtttcaaccagaagatcattggaggtttgcatttgcttattggcttagcccgtaggcagcaaaaatccaatctggttattcaagagttcgtcccgtacgactctagcatccactcgtactttatcactgacgagaacagtggtagcagtaagagtgtgtgcactgttattgatttgttgttagatgattttgtggacattgtaaagtccctgaatctaaattgtgtgagtaaggttgttaatgtgaatgttgattttaaagatttccagtttatgttgtggtgcaatgaggagaaggtcatgactttctatcctcgtttgcaggctgccgctgattggaaacctggttatgttatgcctgtattatacaagtacttggaatcgccgctggaaagagttaatctctggaattatggcaagccgattactttacctacaggatgtttgatgaatgttgctaagtatactcaattatgccaatatttgaatactacaacattagcagtcccggctaatatgcgtgttttacacctcggagccggttctgataaggatgttgcccctggatctgcagttcttaggcagtggttaccagcaggcagcattcttgtagataatgatataaatccatttgtgagtgacagtgttgcctcatattatggaaattgtataaccttacccatagcgtgtcagtgggatttgataatttctgatatgtacgaccctcttactaagaacattggggagtacaacgtgagtaaagatggattctttacttacctttgtcatttaattcgtgacaagttggctctgggtggcagtgtcgccataaaaattacagagttttcttggaacgctgagttatatagtttaatggggaagtttgcgttttggacaatcttttgcaccaacgtaaacgcctcttcaagtgaaggatttttgattggcataaattggttaaataggacccgtaccgagattgacggtaaaaccatgcatgccaattatttgttttggagaaatagtacaatgtggaatggaggggcttacagtctttttgatatgagtaagttccctttgaaggtggctggtacggctgttgtaagcctaaagccagaccaaataaatgatttagtcctctccttgattgagaagggcaagttattagtgcgtgatacacgcaaggaagtatttgttggcgatagccttgtaaatgttaaataaatctatacttgtcatggctgcgatgcaggcctttgctgacaagcctaatcattttataaacttcccattggcccaatttagtggcgttatgggtaagtatttaaagcttcagtcgcaacttgtggaaatgggtttagactgtaaattacagaaagcaccacatgttagtattaccatgctcgatattagagcagatcaatacaaacaggtggaatttgcaatacaagaagtaatagatgatatggcggcatatgagggagatattgtctttgacaaccctcacatgcttggcagatgtcttgttcttgatgttaaaggatttgaagagttgcatgaagatatagttgaaattctccggaaaaggggttgcatagcagatcaatccagacaatggattcctcactgtactgtggcccaatttgaggaagaaaaagaaataaatgagctgcaattctattataaattacccttctacctcaagcataacaacatattaacggatgctaggcttgagcttgtgaagataggttcttccaaaacagatgggttctattgtagtgagctgagcatttggtgtggtgagagactttgttacaagcctccaacacccaaatttagtgatatatttggctattgctgcattgataaaatacgtgttgacttagaaattggtgacctacccgaggatgatgaagaagcgtgggccgagctaagttaccactatcaaagaaacacctacttcttccgctacgtacatgataatagcatttattttcgtaccgtatgcagaatgaagggttgtatgtgttgatttggttttacactagtagtgtaataaacttattattttattgaaacaggcagtatgtgcatggctatggctccccgcactctgcttttgctgattggatgtcagctggtgtttgggttcaatgaacctttaaacaccgtttcacattcaaatgatgattggtttttgtttggtgacagtaggtctgactgcaaccatataagtagcctttctcagcagaattataagtatatggatattaacccagaattgtgtaagtcggggaagatttcttctaaggcgggtaattccctctttagaagttttcatttcaccgatttctacaattatagtggcgaaggttcataaatcatattttatgaaggagttaattttaccccatatgttgggtttaagtgtatgaataatggggataataataggtggatgggtaataaagctcgattttatacccaattgtatcagaagatggctcattatcgtagcctatctataattaatgttacttacacatataatggtaatgctactcccgttgctatgtgtaagcacactgctaatggtgtcacattgaccctaaccctaccttcattggtaaggagacaagtgcacctaattattattatgagagcgaggcaaactttacgttgcatggatgcgatgagtttattgtcccgctctgcgtctttaatggccagtatttatctagtaaactgtattatgatgatagtcagtattattataatattgatacaggcattttatatgggtttaattccaccttgaatattaccactgggttggacttaacctgtatctatctttcattagctcctggtaattataaggccattttaaatgaattattgttaactataccctctaaggctatttgcctgcgtaagcctaaggtgtttacgcttgtgcaagtagttgattctagatggcatagtaataggcaatctgacaatatgactgctattgcgtgtcagctgccatattgttatttccgtaatgccagtaatgattacaatggcatttatgattctcaccatggcgatgctggatttactagcatcttgtctggtttgttatataatgtttcctgtattgcccagcagggtgcatttctttataataatgttagcgcctcttggccagtttttggctacggccattgtccaacggcagctaacattggatatatggcacctgtttgtatgtatgatcctttaccggtcatattacttggtgtcttactgggtatagctgtgttaattattatttttcttattttgtattttatgacggatagcagtgttaggttgcatgaggcctaagtgtttcggaaaatctaaacatgctattcgtgtttttaaccttgttgccctcttctctagggtatattggtgattttagatgtatccaacttgtaaataccgacacctctaatgccagcgctccaagcgttagtacagaggtagttgatgtttccaaagggattggtacttattatgttttagatcgagtctatttaaatgccacactattgcttactggttattaccctgtagatgggtccatgtatagaaacatggctctaacgggaattaataccataagccttaattggtacaaaccaccctttttatcagagtttaatgatggcatatttgctaaggtaaagaaccttaaagcatctttgcccaaagattctatttcatatttccctactataattataggtagtaattttgtcaccacttcctatactgtagtattggaaccgtataatggtataattatggcatccatttgccagtataccatttgtcaactaccgtacacggattgcaaaccgaatacgggcggtaataagttaattggcttttggcacacagagctaaaatcccctgtgtgcattttaaagcgtaattttacgtttaatgttaatgccgaatggctttattttcatttttaccagcagggtggtactttttatgcgtattatgcggatgtttcttctgctactacgtttttgtttagtatgtatattggtgatgtgttaacacaatattttgtgttgccttatatgtgtactctcactacaacaggtgtcttttcaccgcagtattgggttacacctcttgtcaagcgccaatatttatttaattttaatcaaaagggtattattactagtgctgttgattgtgctagtagttataccagcgaaataaagtgtaagacccaaagtatgaatcccaatacgggagtttatgatttatccggttacaccgtccaacctgtaggattagtgtaccggcgtgttagaaatttgcctgattgtaaaattgaggaatggctaactgctaagtctgtaccttctcctctcaattgggagcgcaaaacatttcaaaattgtaacttcgacctgagcagtctattaagatttgttcaggctgagtcactctcatgtagtaatatagatgcttccaaggtttatggtatgtgctttggtagtatatctatagacaagtttgcgatacccaatagacgccgagttgatttgcagctaggcaactctgggtttttgcaatcctttaattacaaaatagatacaagagctacttcgtgtcagctctattatagtcttgcaaaaaataatgtcactgtcaataaccataacccgtcctcttggaacaggcgttatgggttcaatgatgtggctacatttggaactggtaaacatgacgttgcttatgctgaggcttgttttaccgtgggagcatcatattgcccttgcgcgaaccccagcatagtgtcgccatgtaccactggaaaacctaactttgccaattgccctacaggcacctcgaatcgtgagtgcactgttatgccattggctaataatcaatttaagtgtgattgcacttgtaaccctagtcctctaaccacctatgatcttagatgtctccaagcaagaagcatgcttggcgtaggtgatcattgtgaaggtctaggagttttagaagataaatgtggtggcagcaacacctgcaattgttctgctcatgcctttgttggctgggctaaggatagttgcttggctaatggccgctgtcacatttttagtaatttgatgttaaatggcattaatagtggtactacatgttccatggatttgcaattgcctaatactgaagtggtcactggcgtctgcgtcaaatatgacctctacggtataacaggccaaggtatttttaaggaggttaaggctgactattatcatagttggcaaaacctcttatatgatgttaatggcaacttaatcggatttcgcgattttgttgctaataagagttatactattcgaagttgctatagtgggcgggtctcggctgcatatcatcaagatgcaccagaaccagcgctactatatcgcaatttaaaatgtgactatgtctttaacaacaacatatcccgtgaggagacaccacttaactatttcgatagttatcttggttgtgttgttaatgctgacaactcaactgaagaagctgttgacgcgtgtgatttgcgtatgggtagtgggctttgtgtcaactattcaacgtctcaccgcgctcgcagctctgtcagcacgggttataaattaactacttttgaaccatttacagtccgcattgtcaatgatagtgttgagtctgttgatgggttatatgagctgcaaataccaaccaactttactatagctagccatcaggagttcgttcaaacgaggtctccaaaggttactatagactgtgctgcatttgtctgtggtggccacacagcatgccgtcagcagttggttgagtacggctcattctgtgataatattaatgccattcttggcgaggtaaataacctcatagatactatgcaacttcaagttgcaagtgctttaatccaaggtgtcacgttaagctcacgcttatcggatggcattggtggtcaaatagatgatattaattttagtcctctgcttggttgtttaggttctgactgtggcgaagttaccatggcagctcaaaccggacgatctgctatagaggatgtattatttgacaaagtcaaactctctgatgttggctttgtcgaagcatataacaattgcactggaggccaagaagttagagacctactttgtgtgcaatcttttaatggcatcaaagtgctaccgcctgtgttgtctgagaatcaaatttctggttatacagcgggagctactgtatctgctatgttcccatggtctgcagctgcaggtgtgccattttctttaagtgttcaatatagaattaatggtcttggtgtcactatgaatgttcttagtgaaaatcagaaaatgatagcaagtgcatttaacaacgcgataggtgctatacaggaagggtttgctgcaaccaattctgccttagcaaaaatgcagttcgttgtcaatgcaaatgcggaagcactcaataatttattaaaccagctttccaataggtttggtgcaattagtgcttctttacaagaaattctatctcgcctagatgctcttgaagcgcaggctcagatagaccgtcttattaatggcagattaactgcacttaatgcatatgtctctaagcagctgagtgacatgacccttgttaaggtgagtgcagcccaggctatagagaaagttaatgagtgtgttaaaagccaatcatctaggataaatttctgtggcaatggcaatcatatattgtcattagtccagaatgcgccttatggtttatattttattcatttcagctatgtgcctacttcctttacaacggcaaatgtgagtcctgggctatgcatttctggtgatagaggattagcacctaaagctggatattttgttcaagatgatggagagtggaagttcacaggtagtaattattattaccctgaacccattacagataaaaatagtgtcgtgatgagtagttgcgcagcaaactacacaaaggcacctgaagttttcttgaacacttcaatacctaatctacccgactttaaggaggagttagataaatggtttaaaaatcagacgtctattgcgcctgatttatctctcgatttcgagaaattaaacgttaccctcctggacctgactgatgagatgaacaggattcaggatgcaattaagaagttaaatgagagttacatcaacctcaaggacgttggcacatatgaaatgtatgtgaaatggccttggtatgtgtggttgctaattggattagctggtgtagctgtttgtgtgttgttatttttcatatgttgctgcacgggttgtggctcatgttgtttcaagaagtgtggaaattgttgtgatgagtgtggaggacaccaggacagtattgtgatacataatatttcctctcatgaggattgactatcacagcctctcctggaaagacagaaaatctaaacaatttattgcactttccccgctacttggccccgtaagaggcagccatagctatggccgtgtagggtcctaaagctacattggctgctgtctttatcggtccatttattgtagcatgtatgctaggcattggcctagtttattcattgcaattgcaagtttaaatttttcatgttaatgataccatacgtgtgactggcaagccagccactgtgtcttatactataagtacaccagtaacgccgagtgccacgacgctcgacggtactacgtatactttaattagacccataagctcttatacaagagtttaccttggcaaaaccagagggtttgatactggtacatttggcccaaaggtcttggactatgttactaatctaaacctcatcttaattctggtcgtccatacaccttccgtaagcttggtttatgagaccgacagccacatggacatatggcatgtgagtgatgcttggttacgccgaacgcgagactttggtgtcactcgccttgaagatttttgctttcaatttaattattgccaacctcgaattggttattgtagagttcctttaaaggcttggtgtagcaaccagggtaaatttgcagcgcagtttacccttaaaagttgcgaaaaatcaggccaagaaatatttattactagcttcacggcctacgacaaaactgtcaaaaaggccgttagtaagctagtagaagaagctgttgattttatcatctggagagccacgcagctcgaaagatatgtttaatttattccttacagatacagtatggtatgtggggcagattatttttatagtcgcagtgtgtttgatggtcaccataatagtggttgccttccttgcgtctatcaaactttgtattcaactttgcggtttgtgtaatactttgttgctgtctccttctatttgtgtgtataataggagtaagcagctttataagtattataatgaagaagtgagaccgcccccgttagaggtggatgatataataatccaaacattatgactagtaccactcaggctccacagcctgtttatcagtggacggctgatgaggcaattcgattccttaaggaatggaatttctctctcggcattatactactttttgttactatcatactacagttcggttacacgagccgtagcatgtttgtttatgttgtgaaaatgatacttttgtggcttatgtggccactaactattgttttgtgtatttttaactgcgtctatgcgctaaataatgtgtatcttggattttctatagtgtttactatagtgtccattataatgtggattatgtattttgttaatagcatcaggttgtttatcaggactggcagctggtggagcttcaaccccgaaacaaacaacctaatgtgtatagatatgaaaggtactgtgtatgttagacccattatagaggattaccatacactaacagccactatcattcgtggtcacctctatatgcaaggtgttaagctaggcactggcttctctttgtctgatttgcctgcttatgttacagttgctaaggtgtctcacctttgcacttataagcgcgcattcttagacaaggtagacggtgttagcggttttgctgtttatgtgaagtccaaggtcggaaattaccgactgccctcaaataaaccgagtggcatggacaccgcattgttgagaatctaatctaaactttaaggatgtcttttgttcctgggcaagaaaatgccggtagcagaagctcctctggaaaccgcgctggtaatggcatcctcaagaagaccacttgggctgaccaaaccgagcgtggaaatagaggcagaaggaaccatcccaagcagactgcaactactcagcccaatgccgggagtgtggttccccattactcttggttttcgggcatcacccagtttcaaaagggaaaggagttccagtttgcacaaggacagggagtgcctattgccagtggaatccccgcttcagagcaaaagggatattggtatagacacaaccgacgttcttttaaaacacctgatggccagcacaagcagctactgcccagatggtatttttactatcttggaacagggccccatgctggcgcagagtatggcgacgatatcgaaggagttgtctgggtcgcaagccaacaggccgacactaagaccactgccgatgttgttgaaagggacccaagcagtcatgaggctattcctactaggtttgcgcccggcacggtattgcctcagggcttttatgtagaaggctcgggaaggtctgcacctgctagtcgatctggttcgcggtcacaatcccgtgggccaaataatcgcgctagaagcagttccaaccagcgccagcctgcctctgctgtaaaacctgacatggccgaagaaattgctgctcttgttttggctaagcttggtaaagatgccggccagcccaagcaggtaactaagcaaagcgccaaagaagtcaggcagaaaattttaactaagcctcgtcaaaagaggactccaaacaagcagtgcccagtgcagcagtgttttgggaagagaggccctaatcagaactttggaggctctgaaatgttaaaacttggaactagtgatccgcagttccccattcttgcagagttggctccaacacctagtgccttcttctttggatctaaattagaattggtcaaaaagaactctggtggtgctgatgaacccaccaaagatgtttatgaattgcagtattcaggtgcaattagatttgatagtactctacccggttttgagactatcatgaaagtgttgactgagaatttgaatgcctaccaggaccaagctggtagtgtagatctagtgagcccaaagcctccaagaagaggtcgtagacaggctcaagaaaagaaagatgaagtagataatgtaagcgttgcaaagcccaaaagcttggtgcagcgaaatgtaagtagagaattaacccccgaggatcgtagcctgctggctcagatcctagacgatggcgttgtgccagatgggttggaagatgactctaatgtgtaaagagaatgaatcctatgtcggcgctcggtggtaacccctcgcgagaaagtcgggataggacactctctatcagaatggatgtcttgctgtcataacagatagagaaggttgtggcagaccctgtatcaattagttgaaagagattgcaaaatagagaatgtgtgagagaagttagcaaggtcctacgtctaaccataagaacggcgataggcgccccctgggaagagctcacatcagggtactattcctgcaatgcactagtaaatgaatgaagttgatcatggccaattggaagaatcacaaaaaaaaaaaaaa

SEQ ID NO: 37 - DNA, 31357 bp, Coronavirus
tataagagtgattggcgtccgtacgtaccctctcaactctaaaactcttgtagtttaaatctaatctaaactttataaacggcacttcctgcgtgtccatgcccgcgggcctggtcttgtcatagtgctgacatttgtagttccttgactttcgttctctgccagtgacgtgtccattcggcgccagcagcccacccataggttgcataatggcaaagatgggcaaatacggtctcggcttcaaatgggccccagaatttccatggatgcttccgaacgcatcggagaagttgggtaaccctgagaggtcagaggaggatgggttttgcccctctgctgcgcaagaaccgaaagttaaaggaaaaactttggttaatcacgtgagggtgaattgtagccggcttccagctttggaatgctgtgttcagtctgccataatccgtgatatttttgtagatgaggatccccagaaggtggaggcctcaactatgatggcattgcagttcggtagtgccgtcttggttaagccatccaagcgcttgtctattcaggcatggactaatttgggtgtgcttcccaaaacagctgccatggggttgttcaagcgcgtctgcctgtgtaacaccagggagtgctcttgtgacgcccacgtggcctttcacctttttacggtccaacccgatggtgtatgcctgggtaatggccgttttataggctggttcgttccagtcacagccataccggagtatgcgaagcagtggttgcaaccctggtccatccttcttcgtaagggtggtaacaaagggtctgtgacatccggccacttccgccgcgctgttaccatgcctgtgtatgactttaatgtagaggatgcttgtgaggaggttcatcttaacccgaagggtaagtactcctgcaaggcgtatgctcttcttaagggctatcgcggtgttaagcccatcctgtttgtggaccagtatggttgcgactatactggatgtctcgccaagggtcttgaggactatggcgatctcaccttgagtgagatgaaggagttgttccctgtgtggcgtgactccttggatagtgaagtccttgtggcttggcacgttgatcgagatcctcgggctgctatgcgtctgcagactcttgctactgtacgttgcattgattatgtgggccaaccgaccgaggatgtggtggatggagatgtggtagtgcgtgagcctgctcatcttctcgcagccaatgccattgttaaaagactcccccgtttggtggagactatgctgtatacggattcgtccgttacagaattctgttataaaaccaagctgtgtgaatgcggttttatcacgcagtttggctatgtggattgttgtggtgacacctgcgattttcgtgggtgggttgccggcaatatgatggatggctttccatgtccagggtgtaccaaaaattatatgccctgggaattggaggcccagtcatcaggtgttataccagaaggaggtgttctattcactcagagcactgatacagtgaatcgtgagtcctttaagctctacggtcatgctgttgtgccttttggttctgctgtgtattggagcccttgcccaggtatgtggcttccagtaatttggtcttctgttaagtcatactctggtttgacttatacaggagtagttggttgtaaggcaattgttcaagagacagacgctatatgtcgttctctgtatatggattatgtccagcacaagtgtggcaatctcgagcagagagctatccttggattggacgatgtctatcatagacagttgcttgtgaataggggtgactatagtctcctccttgagaatgtggatttgtttgttaagcggcgcgctgaatttgcttgcaaattcgccacctgtggagatggtcttgtacccctcctactagatggtttagtgccccgcagttattatttgattaagagtggtcaagctttcacctctatgatggttaattttagccatgaggtgactgacatgtgtatggacatggctttattgttcatgcatgatgttaaagtggccactaagtatgttaagaaggttactggcaaactggccgtgcgctttaaagcgttgggtgtagccgttgtcagaaaaattactgaatggtttgatttagccgtggacattgctgctagtgccgctggatggctttgctaccagctggtaaatggcttatttgcagtggccaatggtgttataacctttgtacaggaggtgcctgagcttgtcaagaattttgttgacaagttcaaggcatttttcaaggttttgatcgactctatgtcggtttctatcttgtctggacttactgttgtcaagactgcctcaaatagggtgtgtcttgctggcagtaaggtttatgaagttgtgcagaaatctttgtctgcatatgttatgcctgtgggttgcagtgaagccacttgtttggtgggtgagattgaacctgcagtttttgaagatgatgttgttgatgtggttaaagccccattaacatatcaaggctgttgtaagccacccacttctttcgagaagatttgtattgtggataaattgtatatggccaagtgtggtgatcaattttaccctgtggttgttgataacgacactgttggcgtgttagatcagtgctggaggtttccctgtgcgggcaagaaagtcgagtttaacgacaagcccaaagtcaggaagataccctccacccgtaagattaagatcaccttcgcactggatgcgacctttgatagtgttctttcgaaggcgtgttcagagtttgaagttgataaagatgttacattggatgagctgcttgatgttgtgcttgacgcagttgagagtacgctcagcccttgtaaggagcatgatgtgataggcacaaaagtttgtgctttacttgataggttggcaggagattatgtctatctttttgatgagggaggcgatgaagtgatcgccccgaggatgtattgttccttttctgctcctgatgatgaagactgcgttgcagcggatgttgtagatgcagatgaaaaccaagatgatgatgctgaagactcagcagtccttgtcgctgatacccaagaagaggacggcgttgccaaggggcaggttgaggcggattcggaaatttgcgttgcgcatactggtagtcaagaagaattggctgagcctgatgctgtcggatctcaaactcccatcgcctctgctgaggaaaccgaagtcggagaggcaagcgacagggaagggattgctgaggcgaaggcaactgtgtgtgctgatgctgtagatgcctgccccgatcaagtggaggcatttgaaattgaaaaggttgaagactctatcttggatgagcttcaaactgaacttaatgcgccagcggacaagacctatgaggatgtcttggcattcgatgccgtatgctcagaggcgttgtctgcattctatgctgtgccgagtgatgagacgcactttaaagtgtgtggattctattcgcctgctatagagcgcactaattgttggctgcgttctactttgatagtaatgcagagtctacctttggaatttaaagacttggagatgcaaaagctctggttgtcttacaaggccggctatgaccaatgctttgtggacaaactagttaagagcgtgcccaagtctattatccttccacaaggtggttatgtggcagattttgcctatttctttctaagccagtgtagctttaaagcttatgctaactggcgttgtttagagtgtgacatggagttaaagcttcaaggcttggacgccatgtttttctatggggacgttgtgtctcatatgtgcaagtgtggtaatagcatgaccttgttgtctgcagatataccctacactttgcattttggagtgcgagatgataagttttgcgctttttacacgccaagaaaggtctttagggctgcttgtgcggtagatgttaatgattgtcactctatggctgtagtagagggcaagcaaattgatggtaaagtggttaccaaatttattggtgacaaatttgattttatggtgggttacgggatgacatttagtatgtctccttttgaactcgcccagttatatggttcatgtataacaccaaatgtttgttttgttaaaggagatgttataaaggttgttcgcttagttaatgctgaagtcattgttaaccctgctaatgggcgtatggctcatggtgcaggtgttgcaggtgctatagctgaaaaggcgggcagtgcttttattaaagaaacctccgatatggtgaaggctcagggcgtttgccaggttggtgaatgctatgaatctgccggtggtaagttatgtaaaaaggtgcttaacattgtagggccagatgcgcgagggcatggcaagcaatgctattcacttttagagcgtgcttatcagcatattaataagtgtgacaatgttgtcactactttaatttcggctggtatatttagtgtgcctactgatgtctccctaacttacttacttggtgtagtgacaaagaatgtcattcttgtcagtaacaaccaggatgattttgatgtgatagagaagtgtcaggtgacctccgttgctggtaccaaagcgctatcacttcaattggccaaaaatttgtgccgtgatgtaaagtttgtgacgaatgcatgtagttcgctttttagtgaatcttgctttgtctcaagctatgatgtgttgcaggaagttgaagcgctgcgacatgatatacaattggatgatgatgctcgtgtctttgtgcaggctaatatggactgtctgcccacagactggcgtctcgttaacaaatttgatagtgttgatggtgttagaaccattaagtattttgaatgcccgggcgggatttttgtatccagccagggcaaaaagtttggttatgttcagaatggttcatttaaggaggcgagtgttagccaaataagggctttactcgctaataaggttgatgtcttgtgtactgttgatggtgttaacttccgctcctgctgcgtagcagagggtgaagtttttggcaagacattaggttcagtcttttgtgatggcataaatgtcaccaaagttaggtgtagtgccatttacaagggtaaggttttctttcagtacagtgatttgtccgaggcagatcttgtggctgttaaagatgcctttggttttgatgaaccacaactgctgaagtactacactatgcttggcatgtgtaagtggtcagtagttgtttgtggcaattattttgctttcaagcagtcaaataataattgctatataaatgtggcatgtttaatgctgcaacacttgagtttaaagtttcctaagtggcaatggcaagaggcttggaacgagttccgctctggtaaaccactaaggtttgtgtccttggtattagcaaagggcagctttaaatttaatgaaccttctgattctatcgattttatgcgtgtggtgctacgtgaagcagatttgagtggtgccacgtgcaatttggaatttgtttgtaaatgtggtgtgaagcaagagcagcgcaaaggtgttgacgctgttatgcattttggtacgttggataaaggtgatcttgtcaggggttataatatcgcatgtacgtgcggtagtaaacttgtgcattgcacccaatttaacgtaccatttttaatttgctccaacacaccagagggtaggaaactgcccgacgatgttgttgcagctaatatttttactggtggtagtgtgggccattacacgcatgtgaaatgtaaacccaagtaccagctttatgatgcttgtaatgttaataaggtttcggaggctaagggtaattttaccgattgcctctaccttaaaaatttaaagcaaactttttcgtctgtgctgacgactttttatttagatgatgtaaagtgtgtggagtataagccagatttatcgcagtattactgtgagtctggtaaatattatacaaaacccattattaaggcccaatttagaacatttgagaaggttgatggtgtctataccaactttaaattggtgggacatagtattgctgaaaaactcaatgctaagctgggatttgattgtaattctccctttgtggagtataaaattacagagtggccaacagctactggagatgtggtgttggctagtgatgatttgtatgtaagtcggtactcaagcgggtgcattacttttggtaaaccggttgtctggcttggccatgaggaagcatcgctgaaatctctcacatattttaatagacctagtgtcgtttgtgaaaataaatttaatgtgttgcccgttgatgtcagtgaacccacggacaaggggcctgtgcctgctgcagtccttgttaccggcgtccctggagctgatgcgtcagctggtgccggtattgccaaggagcaaaaagcctgtgcttctgctagtgtggaggatcaggttgttacggaggttcgtcaagagccatctgtttcagctgctgatgtcaaagaggttaaattgaatggtgttaaaaagcctgttaaggtggaaggtagtgtggttgttaatgatcccactagcgaaaccaaagttgttaaaagtttgtctattgttgatgtctatgatatgttcctgacagggtgtaagtatgtggtttggactgctaatgagttgtctcgactagtaaattcaccgactgttagggagtatgtgaagtggggtaagggaaagattgtaacacccgctaagttgttgttgttaagagatgagaagcaagagttcgtagcgccaaaagtagtcaaggcgaaagctattgcctgctattgtgctgtgaagtggtttctcctctattgttttagttggataaagtttaatactgataataaggttatatacaccacagaagtagcttcaaagcttactttcaagttgtgctgtttggcctttaagaatgccttacagacgtttaattggagcgttgtgtctaggggctttttcctagttgcaacggtctttttattatggtttaactttttgtatgctaatgttattttgagtgacttctatttgcctaatattgggcctctccctacgtttgtgggacagatagttgcgtggtttaagactacatttggtgtgtcaaccatctgtgatttctaccaggtgacggatttgggctatagaagttcgttttgtaatggaagtatggtatgtgaactatgcttctcaggttttgatatgctggacaactatgatgctataaatgttgttcaacacgttgtagataggcgtttgtcctttgactatattagcctatttaaattagtagttgagcttgtaatcggctactctctttatactgtgtgcttctacccactgtttgtccttattggaatgcagttgttgaccacatggttgcctgaattctttatgctggagactatgcattggagtgctcgtttgtttgtgtttgttgccaatatgcttccagcttttacgttactgcgattttacatcgtggtgacagctatgtataaggtctattgtctttgtagacatgttatgtatggatgtagtaagcctggttgcttgttttgttataagagaaaccgtagtgtccgtgttaagtgtagcaccgttgttggtggttcactacgctattacgatgtaatggctaacggcggcacaggtttctgtacaaagcaccagtggaactgtcttaattgcaattcctggaaaccaggcaatacattcataactcatgaagcagcggcggacctctctaaggagttgaaacgccctgtgaatccaacagattctgcttattactcggtcacagaggttaagcaggttggttgttccatgcgtttgttctacgagagagatggacagcgtgtttatgatgatgttaatgctagtttgtttgtggacatgaatggtctgctgcattctaaagttaaaggtgtgcctgaaacgcatgttgtggttgttgagaatgaagctgataaagctggttttctcggcgccgcagtgttttatgcacaatcgctctacagacctatgttgatggtggaaaagaaattaataactaccgccaacactggtttgtctgttagtcgaactatgtttgacctttatgtagattcattgctgaacgtcctcgacgtggatcgcaagagtctaacaagttttgtaaatgctgcgcacaactctctaaaggagggtgttcagcttgaacaagttatggatacctttattggctgtgcccgacgtaagtgtgctatagattctgatgttgaaaccaagtctattaccaagtccgtcatgtcggcagtaaatgctggcgttgattttacggatgagagttgtaataacttggtgcctacctatgttaaaagtgacactatcgttgcagccgatttgggtgttcttattcagaataatgctaagcatgtacaggctaatgttgctaaagccgctaatgtggcttgcatttggtctgtggatgcttttaaccagctatctgctgacttacagcataggctgcgaaaagcatgttcaaaaactggcttgaagattaagcttacttataataagcaggaggcaaatgttcctattttaactacaccgttctctcttaaagggggcgctgtttttagtagaatgttacaatggttgtttgttgctaatttgatttgtttcattgtgttgtgggcccttatgccaacatatgcagtgcacaaatcggatatgcagttgcctttatatgccagttttaaagttatagataatggtgtgctaagggatgtgtctgttactgacgcatgcttcgcaaacaaatttaatcaatttgatcaatggtatgagtctacttttggtcttgcttattaccgcaactctaaggcttgtcctgttgtggttgctgtaatagatcaagacattggccataccttatttaatgttcctaccacagttttaagatatggatttcatgtgttgcattttataacccatgcatttgctactgatagcgtgcagtgttacacgccacatatgcaaatcccctatgataatttctatgctagtggttgcgtgttgtcatccctctgtactatgcttgcgcatgcagatggaaccccgcatccttattgttatacagggggtgttatgcacaatgcctctctgtatagttctttggctcctcatgtccgttataacctggctagttcaaatggttatatacgttttcccgaagtggttagtgaaggcattgtgcgtgttgtgcgcactcgctctatgacctactgcagggttggtttatgtgaggaggccgaggagggtatctgctttaattttaatcgttcatgggtattgaacaacccgtattatagggccatgcctggaactttttgtggtaggaatgcttttgatttaatacatcaagttttaggaggattagtgcggcctattgatttctttgccttaacggcgagttcagtggctggtgctatccttgcaattattgtcgttttggctttctattatttaataaagcttaaacgtgcctttggtgactacactagtgttgtggttatcaatgtaattgtgtggtgtataaattttctgatgctttttgtgtttcaggtttatcccacattgtcttgtttatatgcttgtttttatttctacacaacgctttatttcccttcggagataagtgttgttatgcatttgcaatggcttgtcatgtatggtgctattatgcccttgtggttttgcattatttacgtggcagtcgttgtttcaaaccatgcattgtggttgttctcttactgccgcaaaattggtaccgaggttcgtagtgacggcacatttgaggaaatggcccttactacctttatgattactaaagaatcttattgtaagttgaaaaattctgtttctgatgttgcttttaacaggtacttgagtctttataacaagtatcgttattttagtggcaaaatggatactgccgcttatagagaggctgcctgttcacaactggcaaaggcaatggaaacatttaaccataataatggtaatgatgttctctatcagcctccaaccgcctctgttactacatcatttttacagtctggtatagtgaagatggtgtcgcccacctctaaagtggagccttgtattgttagtgttacttatggtaacatgacacttaatgggttgtggttggatgataaagtttattgcccaagacatgttatctgttcttcagctgacatgacagaccctgattatcctaatttgctttgtagagtgacatcaagtgatttttgtgttatgtctggtcgtatgagccttactgtaatgtcttatcaaatgcagggctgccaacttgttttgactgttacactgcaaaatcctaacacgcctaagtattccttcggtgttgttaagcctggtgagacatttactgtactggctgcatacaatggcagacctcaaggagccttccatgttacgcttcgtagtagccataccataaagggctcctttctatgtggatcctgcggttctgtaggatatgttttaactggcgatagtgtacgatttgtttatatgcatcagctagagttgagtactggttgtcataccggtactgactttagtgggaacttttatggtccctatagagatgcgcaagttgtacaattgcctgttcaggattatacgcagactgttaatgttgtagcttggctttatgctgctatttttaacagatgcaactggtttgtgcaaagtgatagttgttccctggaggagtttaatgtttgggctatgaccaatggttttagctcaatcaaagccgatcttgtcttggatgcgcttgcttctatgacaggcgttacagttgaacaggtgttggccgctattaagaggctgcattctggattccagggcaaacaaattttaggtagttgtgtgcttgaagatgagctgacaccaagtgatgtttatcaacaactagctggtgtcaagctacagtcaaagcgcacaagagttataaaaggtacatgttgctggatattggcttcaacgtttttgttctgtagcattatctcagcatttgtaaaatggactatgtttatgtatgttactacccatatgttgggagtgacattgtgtgcactttgttttgtaagctttgctatgttgttgatcaagcataagcatttgtatttaactatgtatattatgcctgtgttatgcacactgttttacaccaactatttggttgtgtacaaacagagttttagaggtctagcttatgcttggctttcacactttgtccctgctgtagattatacatatatggatgaagttttatatggtgttgtgttgctagtagctatggtgtttgttaccatgcgtagcataaaccacgacgtcttttctattatgttcttggttggtagacttgtcagcctggtatccatgtggtattttggagccaatttagaggaagaggtactattgttcctcacatccctatttggcacgtacacatggactactatgttgtcattggctaccgctaaggttattgctaaatggttggctgtgaatgtcttgtacttcacagacgtaccgcaaattaaattagttcttttgagctacttgtgtattggttatgtgtgttgttgttattggggaatcttgtcactccttaatagcatttttaggatgccattgggcgtctacaattataaaatctccgttcaggagttacgttatatgaatgctaatggcttgcgcccacctagaaatagttttgaggccctgatgcttaattttaagctgttgggaattggtggtgtgccagtcattgaagtatctcaaattcaatcaagattgacggatgttaaatgtgctaatgttgtgttgcttaattgcctccagcacttgcatattgcatctaattctaagttgtggcagtattgtagtactttgcacaatgaaatactggctacatctgatttgagcgtggccttcgataagttggctcagctcttagttgttttatttgctaatccagcagcagtggatagcaagtgccttgcaagtattgaagaagtgagcgatgattacgttcgcgacaatactgtcttgcaagccttacagagtgaatttgttaatatggctagcttcgttgagtatgaacttgctaagaagaatctagatgaggctaaggctagcggctctgccaatcaacagcagattaagcagctagagaaggcgtgtaatattgctaagtcagcatatgagcgcgacagagctgttgctcgtaagctggaacgtatggctgatttagctcttacaaacatgtataaagaagctagaattaatgataagaagagtaaggtagtgtctgcattgcaaaccatgctctttagtatggtgcgtaagctagataaccaagctcttaattctattttagataatgcagttaagggttgtgtacctttgaatgcaataccatcattgacttcgaacactctgactataatagtgccagataagcaggtttttgatcaggttgtggataatgtgtatgtcacctatgctgggaatgtatggcatatacagtttattcaagatgctgatggtgctgttaaacaattgaatgagatagatgttaattcaacctggcctctagtcattgctgcaaataggcataatgaagtgtctactgttgttttgcagaacaatgagttgatgcctcagaagttgagaactcaggttgtcaatagtggctcagatatgaattgtaatactcctacccagtgttactataatactactggcacgggtaagattgtgtatgctatacttagtgactgtgatggtctcaagtacactaagatagtaaaagaagatggaaattgtgttgttttggaattggatcctccctgtaagttttctgttcaggatgtgaagggccttaaaattaagtacctttactttgtgaaggggtgtaatacactggctagaggctgggttgtaggcaccttatcctcgacagtgagattgcaggcgggtacggcaactgagtatgcctccaactctgcaatactgtcgctgtgtgcgttttctgtagatcctaagaaaacgtacttggattatataaaacagggtggagttcccgttactaattgtgttaagatgttatgtgaccatgctggcactggtatggccattactattaagccggaggcaaccactaatcaggattcttatggtggtgcttccgtttgtatatattgccgctcgcgtgttgaacatccagatgttgatggattgtgcaaattacgcggcaagtttgtccaagtgcccttaggcataaaagatcctgtgtcatatgtgttgacgcatgatgtttgtcaggtttgtggcttttggcgagatggtagctgttcctgtgtaggcacaggctcccagtttcagtcaaaagacacgaactttttaaacgggttcggggtacaagtgtaaatgcccgtcttgtaccctgtgccagtggcttggacactgatgttcaattaagggcatttgacatttgtaatgctaatcgagctggcattggtttgtattataaagtgaattgctgccgcttccagcgtgtagatgaggacggcaacaagttggataagttctttgttgttaaaagaactaatttagaagtgtataataaggagaaagaatgctatgagttgacaaaagaatgcggtgttgtggctgaacacgagttcttcacatttgatgtggagggaagtcgggtaccacacatagtccgtaaagatctttcaaagtttactatgttagatctttgctatgcattgcgtcattttgaccgcaatgattgttcaactcttaaggaaattctccttacatatgctgagtgtgaagagtcctacttccaaaagaaggactggtatgattttgttgagaatcctgatataattaatgtgtataaaaagcttggtcctatatttaatagagccctgcttaacactgccaagtttgcagacgcattagtggaggcaggcttagtaggtgttttaacacttgataatcaagatttatatggtcaatggtatgactttggagattttgtcaagacagtacctggttgtggtgttgccgtggcagactcttattattcatatatgatgccaatgctgactatgtgtcatgcgttggatagtgagttgtttgttaatggtacttatagggagtttgaccttgttcagtatgattttactgatttcaagctagagctcttcactaagtattttaagcattggagtatgacctaccacccgaacacctgtgagtgcgaggatgacaggtgcattattcattgcgccaattttaatatactttttagtatggtcttacctaagacctgttttgggcctcttgttaggcagatatttgtggatggtgttcctttcgttgtgtcgatcggttaccattataaagaattaggtgttgttatgaatatggatgtggatacacatcgttatcgcttgtctcttaaggacttgcttttgtatgctgcagaccctgcccttcatgtggcgtctgctagtgcactgcttgatttgcgcacatgttgttttagcgttgcagctattacaagtggcgtaaaatttcaaacagttaaacctggaaattttaatcaggatttttatgagtttattttgagtaaaggcctgcttaaagaggggagctccgttgatttgaagcacttcttctttacgcaggatggtaatgctgctattactgattataattattacaagtataatctacccaccatggtggatattaagcagttgttgtttgttttagaagttgttaataagtattttgagatctatgagggtgggtgtatacccgcaacacaggtcattgttaataattatgataagagtgctggctatccatttaataaatttggaaaggccaggctctattatgaggcattatcatttgaggagcaggatgaaatttatgcgtataccaaacgcaatgtcctgccgaccctaactcaaatgaatcttaaatatgctattagtgctaagaatagggcccgcaccgttgctggtgtctctattctcagtactatgactggcagaatgtttcatcaaaagtgtctaaagagtatagcagctactcgcggtgttcctgtagttataggcaccacgaagttctatggcggttgggatgatatgttacgccgccttattaaagatgttgatagtcctgtactcatgggttgggactatcctaaatgtgatcgtgctatgccaaacatactgcgtattgttagtagtttggtgctagcccgtaaacatgattcgtgctgttcgcatacggatagattctatcgtcttgcgaacgagtgcgcccaagttttgagtgaaattgttatgtgtggtggttgttattatgttaaaccaggtggcactagtagtggggatgcaaccactgcttttgctaattctgtgtttaacatttgtcaagctgtttccgccaatgtatgctcgcttatggcatgcaatggacacaaaattgaagatttgagtatacgcgagttacaaaagcgcctatactctaatgtctatcgtgcggaccatgttgaccccgcatttgttagtgagtattatgagtttttaaataagcattttagtatgatgattttgagtgatgatggtgttgtgtgttataattcagagtttgcgtccaagggttatattgctaatataagtgcctttcaacaggtattatattatcaaaataatgtgtttatgtctgaggccaaatgttgggtagaaacagacatcgaaaagggaccgcatgaattttgttctcaacatacaatgctagtcaagatggatggtgatgaagtctaccttccataccctgatccttcgagaatcttaggagcaggctgttttgttgatgatttattaaagactgatagcgttctcttgatagagcgtttcgtaagtcttgcaattgatgcttatcctttagtataccatgagaacccagagtatcaaaatgtgttccgggtatatttagaatatataaagaagctgtacaatgatctcggtaatcagatcctggacagctacagtgttattttaagtacttgtgatggtcaaaagtttactgatgagaccttttacaagaacatgtatttaagaagtgcagtgctgcaaagcgttggtgcctgcgttgtctgtagttctcaaacatcattacgttgtggcagttgcatacgcaagcctttgctgtgttgcaaatgcgcctatgatcatgttatgtccactgatcataaatatgtcctgagtgtgtcaccatatgtgtgtaattcaccgggatgtgatgtaaatgatgttaccaaattgtatttaggtggtatgtcatattattgtgaggaccataaaccacagtattcattcaaattggtgatgaatggtatggtttttggtttatataaacaatcttgtactggttcgccctacatagaggattttaataaaatagctagttgcaaatggacagaagtcgatgattatgtgctagctaatgaatgcaccgaacgccttaaattgtttgccgcagaaacgcagaaggccacagaagaggcctttaagcaatgttatgcgtcagcaacgatccgtgagatcgtgagcgatcgggagttaattttatcttgggaaattggtaaagtgagaccaccacttaataaaaattatgtttttactggctaccattttactaataatggtaagacagttttaggtgagtatgtttttgataagagtgagttgactaatggtgtgtactatcgcgccacaaccacttataagttatctgtaggtgatgtgttcattttaacatcacacgcagtgtctagtttaagtgctcctacattagtaccgcaggagaattatactagcattcgttttgctagtgtttatagtgtgcctgagacgtttcagaataatgtgcctaattatcagcacattggaatgaagcgctattgtactgtacagggaccgcctggtactggtaagtcccatctagccattgggctagctgtttattattgtacagcgcgcgtggtgtataccgctgctagccatgctgcagttgacgcgctgtgtgaaaaggcacataaatttttaaatattaatgactgcacgcgtattgttcctgcaaaggtgcgtgtagattgttatgataaatttaaggtcaatgacaccactcgcaagtatgtgtttactacaataaatgcattacctgagttggtgactgacattattgtcgttgatgaagttagtatgcttaccaactatgagctgtctgttattaacagtcgtgttagtgctaagcattatgtgtatattggagaccctgcgcagttacctgcaccacgtgtgctactgaataagggaactctagaacctagatattttaattccgttaccaagctaatgtgttgtttgggtccagatattttcttgggcacctgttatagatgccctaaggagattgtggatacggtgtcagccttggtttataataataagctgaaggctaaaaatgataatagctccatgtgctttaaggtttattataagggccagactacacatgagagttctagtgctgttaatatgcagcaaatacatttaattagtaagtttttaaaggcaaaccccagttggagtaacgccgtatttattagtccttataatagtcagaactatgttgctaagagagtcttgggattacaaacccagacagtagactcagcgcagggttctgaatatgattttgttatttattcacagactgcggaaacagcgcattctgtcaatgtaaatagattcaatgttgctattacacgtgctaagaagggtattctctgtgtcatgagtagtatgcaattatttgagtctcttaattttactacactgacgttggataagattaacaatccacgattacagtgtactacaaatttgtttaaggattgtagcaggagctatgtaggatatcacccagcccatgcaccatcctttttggcagttgatgacaaatataaggtaggcggtgatttagccgtttgccttaatgttgctgattctgctgtcacttattcgcggcttatatcactcatgggattcaagcttgacttgacccttgatggttattgtaagctgtttataactagagatgaagctatcaaacgtgttagagcctgggttggcttcgatgcagaaggtgcccatgcgatacgtgatagcattgggacaaatttcccattacaattaggcttttcgactggaattgattttgttgtcgaagccactggaatgtttgctgagagagatggttatgtctttaaaaaggcagccgcacgagctcctcctggcgaacaatttaaacaccttatcccacttatgtcaagagggcagaaatgggatgtggttcgaattagaatagtacaaatgttgtcagaccacctagcggatttggcagacagtgttgtacttgtgacgtgggctgccagctttgagctcacatgtttgcgatatttcgctaaagttggaagagaagttgtgtgtagtgtctgcaccaagcgtgcgacatgttttaattctagaactggatactatggatgctggcgacatagttattcctgtgattacctgtacaacccactaatagttgacattcaacagtggggatatacaggatctttaactagcaatcatgatcctatttgcagcgtgcataagggtgctcatgttgcatcatctgatgctatcatgacccggtgtctagctgttcatgattgcttttgtaagtctgttaattggaatttagaataccccattatttcaaatgaggtcagtgttaatacctcctgcaggttattgcagcgcgtaatgtttagggctgcgatgctatgcaataggtatgatgtgtgttatgacattggcaaccctaaaggtcttgcctgtgtcaaaggatatgattttaagttttatgatgcctcccctgttgttaagtctgttaaacagtttgtttataaatacgaggcacataaagatcaatttttagatggtttgtgtatgttttggaactgcaatgtggataagtatccagcgaatgcagttgtgtgtaggtttgacacgcgtgtgttgaacaaattaaatctccctggctgtaatggtggcagtttgtatgttaacaaacatgcattccacaccagtccctttacccgggctgccttcgagaatttgaagcctatgcctttcttttattattcagatacgccctgtgtgtatatggaaggcatggaatctaagcaggtcgattatgtcccattgagaagcgctacatgcatcacaagatgcaatttaggtggcgctgtttgtttaaaacatgctgaggagtatcgtgagtaccttgagtcttacaatacggcaaccacagcgggttttactttttgggtctataagacttttgatttttataacctttggaatacttttactaggctccaaagtttagaaaatgtagtgtataatttggtcaatgctggacactttgatggccgggcgggtgaactgccttgtgctgttataggtgagaaagtcattgccaagattcaaaatgaggatgtcgtggtctttaaaaataacacgccattccccactaatgtggctgtcgaattatttgctaagcgcagtattcggccccaccccgagcttaagctctttagaaatttgaatattgacgtgtgctggagtcacgtcctttgggattatgctaaggatagtgtgttttgcagttcgacgtataaggtctgcaaatacacagatttacagtgcattgaaagcttgaatgtactttttgatggtcgtgataatggtgctcttgaagcttttaagaagtgccggaatggcgtctacattaacacgacaaaaattaaaagtctgtcgatgattaaaggcccacaacgtgccgatttgaatggcgtagttgtggagaaagttggagattctgatgtggaattttggtttgctgtgcgtaaagacggtgacgatgttatcttcagccgtacagggagccttgaaccgagccattaccggagcccacaaggtaatccgggtggtaatcgcgtgggtgatctcagcggtaatgaagctctagcgcgtggcactatctttactcaaagcagattattatcttctttcacacctcgatcagagatggagaaagattttatggatttagatgatgatgtgttcattgcaaaatatagtttacaggactacgcgtttgaacacgttgtttatggtagttttaaccagaagattattggaggtttgcatttgcttattggcttagcccgtaggcagcaaaaatccaatctggtaattcaagagttcgtgacatacgactctagcattcattcgtactttatcactgacgagaacagtggtagtagtaagagtgtgtgcactgttattgatttattgttagatgattttgtggacattgtaaagtccctgaatctaaagtgtgtgagtaaggttgttaatgttaatgttgattttaaagatttccagtttatgttgtggtgcaatgaggagaaggtcatgactttctatcctcgtttgcaggctgctgctgactggaaacctggttatgttatgcctgtcttatataagtatttggaatcgcctctggaaagagtaaacctctggaattatggcaagccgattactttacctacaggatgtatgatgaatgttgctaagtatactcaattatgtcaatatttgagcactacaacattagcagttccggctaatatgcgtgtcttacaccttggtgccggttcggataagggtgttgcccctgggtctgcagttcttaggcagtggctaccagcgggaagtattcttgtagataatgatgtgaatccatttgtgagtgacagtgtcgcctcatattatggaaattgtataaccttaccctttgattgtcagtgggatctgataatttctgatatgtacgaccctcttactaagaacattggggagtacaacgtgagtaaagatggattctttacttacctctgtcatttaattcgtgacaagttggctctgggtggcagtgttgccataaaaataacagagttttcttggaacgctgagttatatagtttaatggggaagtttgcgttctggacaatcttttgcaccaacgtaaacgcctcttcaagtgaaggatttttgattggcataaattggttgaataagacccgtaccgaaattgacggtaaaaccatgcatgccaattatctgttttggagaaatagtacaatgtggaatggaggggcttacagtctctttgacatgagtaagttccctttgaaagcggctggtacggctgttgttagccttaaaccagaccaaataaatgacttagtcctctccttgattgagaagggcaagttattagtgcgtgatacacgcaaagaagtttttgttggcgatagcctagtaaatgtcaaataaatctatacttgtcgtggctgtgaaaatggcctttgctgacaagcctaatcatttcataaactttcccctggcccaatttagtggctttatgggtaagtatttaaagctacagtctcaacttgtggaaatgggtttagactgtaaattacagaaggcaccacatgttagtattaccctgcttgatattaaagcagaccaatacaaacaggtggaatttgcaatacaagaaataatagatgatctggcggcatatgagggagatattgtctttgacaaccctcacatgcttggcagatgccttgttcttgatgttagaggatttgaagagttgcatgaagatattgttgaaattctccgcagaaggggttgcacggcagatcaatccagacactggattccgcactgcactgtggcccaatttgacgaagaaagagaaacaaaaggaatgcaattctatcataaagaacccttctacctcaagcataacaacctattaacggatgctgggcttgagctcgtgaagataggttcttccaaaatagatgggttttattgtagtgaactgagtgtttggtgtggtgagaggctttgttataagcctccaacacccaaattcagtgatatatttggctattgctgcatagataaaatacgtggtgatttagaaataggagacctaccgcaggatgatgaggaagcgtgggccgagctaagttaccactatcaaagaaacacctacttcttcagacatgtgcacgataatagcatctattttcgtaccgtgtgtagaatgaagggttgtatgtgttgatttgtttttacactattagtgtaataagcttattattttgttgaaaagggcaggatgtgcatagctatggctcctcgcacactgcttttgctgatttgatgtcagctggtgtttgggttcaatgaacctcttaacatcgtttcacatttaaatgatgactggtttctatttggtgacagtcgttctgactgtacctatgtagaaaataacggtcatcctaaattagattggcttgacctcgacccaaagttgtgtaattcaggaaagatttccgcaaagagtggtaactctctctttaggagttttcacttcactgatttttacaattatacgggtgagggagaccaaattgtattttatgaaggagttaattttagtcccagccatggctttaaatgcctggctcatggagataataaaagatggatgggcaataaagctcgattttatgcccgagtgtatgagaagatggcccaatataggagcctatcgtttgttaatgtgtcttatgcctatggaggtaatgcaaagcccgcctccatttgcaaagacaatactttaacactcaataaccccaccttcatatcgaaggagtctaattatgttgattattactatgagagtgaggctaatttcacactagaaggttgtgatgaatttatagtaccgctctgtggttttaatggccattccaagggcagctcttcggatgctgccaataaatattatactgactctcagagttactataatatggatattggtgtcttatatgggttcaattcgaccttggatgttggcaacactgctaaggatccgggtcttgatctcacttgcaggtatcttgcattgactcctggtaattataaggctgtgtccttagaatatttgttaagcttaccctcaaaggctatttgcctccataagacaaagcgctttatgcctgtgcaggtagttgactcaaggtggagtagcatccgccagtcagacaatatgaccgctgcagcctgtcagctgccatattgtttctttcgcaacacatctgcgaattatagtggtggcacacatgatgcgcaccatggtgattttcatttcaggcagttattgtctggtttgttatataatgtttcctgtattgcccagcagggtgcatttctttataataatgttagttcctcttggccagcctatgggtacggtcattgtccaacggcagctaacattggttatatggcacctgtttgtatctatgaccctctcccggtcatactgctaggtgtgttattgggtatagctgtgttgattattgtgtttttgatgttttattttatgacggatagcggtgttagattgcatgaggcataatctaaacatgctgttcgtgtttattctatttttgccctcttgtttagggtatattggtgattttagatgtatccagcttgtgaattcaaacggtgctaatgttagtgctccaagcattagcactgagaccgttgaagtttcacaaggcctggggacatattatgtgttagatcgagtttatttaaatgccacattattgcttactggttactacccggtcgatggttctaagtttagaaacctcgctcttacgggaactaactcagttagcttgtcgtggtttcaaccaccctatttaagtcagtttaatgatggcatatttgcgaaggtgcagaaccttaagacaagtacgccatcaggtgcaactgcatattttcctactatagttataggtagtttgtttggctatacttcctataccgttgtaatagagccatataatggtgttataatggcctcagtgtgccagtataccatttgtctgttaccttacactgattgtaagcctaacactaatggtaataagcttatagggttttggcacacggatgtaaaacccccaatttgtgtgttaaagcgaaatttcacgcttaatgttaatgctgatgcattttattttcatttttaccaacatggtggtactttttatgcgtactatgcggataaaccctccgctactacgtttttgtttagtgtatatattggcgatattttaacacagtattatgtgttacctttcatctgcaacccaacagctggtagcacttttgctccgcgctattgggttacacctttggttaagcgccaatatttgtttaatttcaaccagaagggtgtcattactagtgctgttgattgtgctagtagttataccagtgaaataaaatgtaagacccagagcatgttacctagcactggtgtctatgagttatccggttatacggtccaaccagttggagttgtataccggcgtgttgctaacctcccagcttgtaatatagaggagtggcttactgctaggtcagtcccctcccctctcaactgggagcgtaagacttttcagaattgtaattttaatttaagcagcctgttacgttatgttcaggctgagagtttgttttgtaataatatcgatgcttccaaagtgtatggcaggtgctttggtagtatttcagttgataagtttgctgtaccccgaagtaggcaagttgatttacagcttggtaactctggatttctgcagactgctaattataagattgatacagctgccacttcgtgtcagctgcattacaccttgcctaagaataatgtcaccataaacaaccataacccctcgtcttggaataggaggtatggctttaatgatgctggcgtctttggcaaaaaccaacatgacgttgtttacgctcagcaatgttttactgtaagatctagttattgcccgtgtgctcaaccggacatagttagcccttgcactactcagactaagcctaagtctgcttttgttaatgtgggtgaccattgtgaaggcttaggtgttttagaagataattgtggcaatgctgatccacataagggttgtatctgtgccaacaattcatttattggatggtcacatgatacctgccttgttaatgatcgctgccaaatttttgctaatatattgttaaatggcattaatagtggtaccacatgttccacagatttgcagttgcctaatactgaagtggttactggcatttgtgtcaaatatgacctctacggtattactggacaaggtgtttttaaagaggttaaggctgactattataatagctggcaaacccttctgtatgatgttaatggtaatttgaatggttttcgtgatcttaccactaacaagacttatacgataaggagctgttatagtggccgtgtttctgctgcatttcataaagatgcacccgaaccggctctgctctatcgtaatataaattgtagctatgtttttagcaataatatttcccgtgaggagaacccacttaattactttgatagttatttgggttgtgttgttaatgctgataaccgcacggatgaggcgcttcctaattgtgatctccgtatgggtgctggcttatgcgttgattattcaaaatcacgcagggctgaccgatcagtttctactggctatcggttaactacatttgagccatacactccgatgttagttaatgatagtgtccaatccgttgatggattatatgagatgcaaataccaaccaattttactattgggcaccatgaggagttcattcaaactagatctccaaaggtgactatagattgtgctgcatttgtctgtggtgataacactgcatgcaggcagcagttggttgagtatggctctttctgtgttaatgttaatgccattcttaatgaggttaataacctcttggataatatgcaactacaagttgctagtgcattaatgcagggtgttactataagctcgagactgccagacggcatctcaggccctatagatgacattaattttagtcctctacttggatgcataggttcaacatgtgctgaagacggcaatggacctagtgcaatccgagggcgttctgctatagaggatttgttatttgacaaggtcaaattatctgatgttggctttgtcgaggcttataataattgcaccggtggtcaagaagttcgtgacctcctttgtgtacaatcttttaatggcatcaaagtattacctcctgtgttgtcagagagtcagatctctggctacacaaccggtgctactgcggcagctatgttcccaccgtggtcagcagctgccggtgtgccatttagtttaagtgttcaatatagaattaatggtttaggtgtcactatgaatgtgcttagtgagaaccaaaagatgattgctagtgcttttaacaatgcgctgggtgctatccaggatgggtttgatgcaaccaattctgctttaggtaagatccagtccgttgttaatgcaaatgctgaagcactcaataacttactaaatcaactttctaacaggtttggtgctattagtgcttctttacaagaaattctaactcggcttgaggctgtagaagcaaaagcccagatagatcgtcttattaatggcaggttaactgcacttaatgcgtatatatccaagcaacttagtgatagtacgcttattaaagttagtgctgctcaggccatagaaaaggtcaatgagtgcgttaagagccaaaccacgcgtattaatttctgtggcaatggtaatcatatattatctcttgtccagaatgcgccttatggcttatattttatacacttcagctatgtgccaatatcctttacaaccgcaaatgtgagtcctggactttgcatttctggtgatagaggattagcacctaaagctggatattttgttcaagatgatggagaatggaagttcacaggcagttcatattactaccctgaacccattacagataaaaacagtgtcattatgagtagttgcgcagtaaactacacaaaggcacctgaagttttcttgaacacttcaatacctaatccacccgactttaaggaggagttagataaatggtttaagaatcagacgtctattgcgcctgatttatctctcgatttcgagaagttaaatgttactttgctggacctgacgtatgagatgaacaggattcaggatgcaattaagaagttaaatgagagctacatcaacctcaaggaagttggcacatatgaaatgtatgtgaaatggccttggtatgtttggttgctaattggattagctggtgtagctgtttgtgtgttgttattctttatatgttgctgcacaggttgtggctcatgttgttttaagaagtgtggaaattgttgtgatgagtatggaggacaccaggacagtattgtgatacataatatttcctctcatgaggattgactatcacagcctctcctggaaagacagaaaatctaaacaatttatagcattctcattgctacctggccccgtaagaggcagtcatagctatggccgtgttggtcctaaggctacattggctgctgtctttattggtccatttattgtagcatgtatgctaggcattggcctagtttatttattgcaattgcaagttcaaatttttcatgttaaggataccatacgtgtgactggcaagccagccactgtgtcttatactacaagtacaccagtaacaccgagcgcgacgacgctcgatggtactacgtatactttaattagacccactagctcttatacaagagtttatcttggtactccaagaggttttgattatagtacatttgggcctaagaccctagattatgttactaatctaaacctcatcttaattctggtcgtccatatacttttaaggcattgtccaggcatatgagaccaacagccacatggatttggcatgtgagtgatgcatggttacgccgcacgcgggactttggtgtcattcgcctagaagatttttgttttcaatttaattatagccaaccccgagttggttattgtagagttcctttaaaggcttggtgtagcaaccagggtaaatttgcagcgcagtttaccctaaaaagttgcgaaaaaccaggtcacgaaaaatttattactagcttcacggcctacggcagaactgtccaacaggccgttagcaagttagtagaagaagctgttgattttattctttttagggccacgcagctcgaaagaaatgtttaatttattccttacagacacagtatggtatgtggggcagattatttttatattcgcagtgtgtttgatggtcaccataattgtggttgccttccttgcgtctatcaaactttgtattcaactttgcggtttatgtaatactttggtgctgtccccttctatttatttgtatgataggagtaagcagctttataagtattataatgaagaaatgagactgcccctattagaggtggatgatatctaatctaaacattatgagtagtactactcaggccccagagcccgtctatcaatggacggccgacgaggcagttcaattccttaaggaatggaacttctcgttgggcattatactactctttattactatcatactacagttcggttacacgagccgtagcatgtttatttatgttgtgaaaatgataatcttgtggttaatgtggccactgactattgttttgtgtattttcaattgcgtgtatgcgctaaataatgtgtatcttggattttctatagtgtttactatagtgtccattgtaatctggattatgtattttgttaatagcataaggttgtttatcaggactggtagctggtggagcttcaaccccgaaacaaacaaccttatgtgtatagatatgaaaggtaccgtgtatgttagacccattattgaggattaccatacactaacagccactattattcgtggccacctctacatgcaaggtgttaagctaggcaccggtttctctttgtctgacttgcccgcttatgttacagttgctaaggtgtcacacctttgcacttataagcgcgcattcttagacaaggtagacggtgttagcggttttgctgtttatgtgaagtccaaggtcggaaattaccgactgccctcaaacaaaccgagtggcgcggacaccgcattgttgagaatctaatctaaactttaaggatgtcttttgttcctgggcaagaaaatgccggtggcagaagctcctctgtaaaccgcgctggtaatggaatcctcaagaagaccacttgggctgaccaaaccgagcgtggaccaaataatcaaaatagaggcagaaggaatcagccaaagcagactgcaactactcaacccaactccgggagtgtggttccccattactcctggttttctggcattacccagttccaaaagggaaaggagtttcagtttgcagaaggacaaggagtgcctattgccaatggaatccccgcttcagagcaaaagggatattggtatagacacaaccgccgttcttttaaaacacctgatgggcagcagaagcaattactgcccagatggtatttttactatcttggcacagggccccatgctggagccagttatggagacagcattgaaggtgtcttctgggttgcaaacagccaagcggacaccaatacccgctctgatattgtcgaaagggacccaagcagtcatgaggctattcctactaggtttgcgcccggcacggtattgcctcagggcttttatgttgaaggctctggaaggtctgcacctgctagccgatctggttcgcggtcacaatcccgtgggccaaataatcgcgctagaagcagttccaaccagcgccagcctgcctctactgtaaaacctgatatggccgaagaaattgctgctcttgttttggctaagctcggtaaagatgccggccagcccaagcaagtaacgaagcaaagtgccaaagaagtcaggcagaaaattttaaacaagcctcgccaaaagaggactccaaacaagcagtgcccagtgcagcagtgttttggaaagagaggccccaatcagaattttggaggctctgaaatgttaaaacttggaactagtgatccacagttccccattcttgcagagttggctccaacagttggtgccttcttctttggatctaaattagaattggtcaaaaagaattctggtggtgctgatgaacccaccaaagatgtgtatgagctgcaatattcaggtgcagttagatttgatagtactctacctggttttgagactatcatgaaagtgttgaatgagaatttgaatgcctaccagaaggatggtggtgcagatgtggtgagcccaaagccccaaagaaaagggcgtagacaggctcaggaaaagaaagatgaagtagataatgtaagcgttgcaaagcccaaaagctctgtgcagcgaaatgtaagtagagaattaaccccagaggatagaagtctgttggctcagatccttgatgatggcgtagtgccagatgggttagaagatgactctaatgtgtaaagagaatgaatcctatgtcggcgctcggtggtaacccctcgcgagaaagtcgggataggacactctctatcagaatggatgtcttgctgtcataacagatagagaaggttgtggcagaccctgtatcaattagttgaaagagattgcaaaatagagaatgtgtgagagaagttagcaaggtcctacgtctaaccataagaacggcgataggcgccccctgggaagagctcacatcagggtactattcctgcaatgccctagtaaatgaatgaagttgatcatggccaattggaagaatcacaaaaaaaaaaaaaaaaaaaaaaa

SEQ ID NO: 38 - DNA, 31357 bp, Coronavirus; identical to SEQ ID NO: 37

SEQ ID NO: 39 - DNA, 31233 bp, Coronavirus
attggcgtccgtacgtaccctttctactctcaaactcttgttagtttaaatctaatctaaactttataaacggcacttcctgtgtgtccatgcccgtgggcttggtcttgtcatagtgctgacatttgtggttccttggtttttgttctctgccagtgacgtgtccattcggcgccagcagcccacccataggttgcataatggcaaagatgggcaaatacggtctcggcttcaaatgggccccagaatttccatggatgcttccgaacgcatcggagaagttgggtagccctgagaggtcagaggaggatgggttttgcccctctgctgcgcaagaaccaaaaactaaaggaaaaactttggttaatcacgtgagggtgaattgtagccggcttccagctttggaatgctgtgttcagtctgccataatccgtgatatttttgtagatgaggatccccagaaggtggaggcctcaactatgatggcattgcagttcggtagtgccgtcttggttaagccatccaagcgcttgtctattcaggcatggactaatttgggtgtgcttcccaaaacagctgccatggggttgttcaagcgcgtctgcctgtgtaacaccagggagtgctcttgtgacgcccacgtggcctttcacctttttacggtccaacccgatggtgtatgcctgggtaatggccgttttataggctggttcgttccagtcacagccataccggagtatgcgaagcagtggttgcaaccctggtccatccttcttcgtaagggtggtaacaaagggtctgtgacatccggccacttccgccgcgctgttaccatgcctgtgtatgactttaatgtagaggatgcttgtgaggaggttcatcttaacccgaagggtaagtactcctgcaaggcgtatgctcttcttaagggctatcgcggtgttaagcccatcctgtttgtggaccagtatggttgcgactatactggatgtctcgccaagggtcttgaggactatggcgatctcaccttgagtgagatgaaggagttgttccctgtgtggcgtgactccttggatagtgaagtccttgtggcttggcacgttgatcgagatcctcgggctgctatgcgtctgcagactcttgctactgtacgttgcattgattatgtgggccaaccgaccgaggatgtggtggatggagatgtggtagtgcgtgagcctgctcatcttctcgcagccaatgccattgttaaaagactcccccgtttggtggagactatgctgtatacggattcgtccgttacagaattctgttataaaaccaagctgtgtgaatgcggttttatcacgcagtttggctatgtggattgttgtggtgacacctgcgattttcgtgggtgggttgccggcaatatgatggatggctttccatgtccagggtgtaccaaaaattatatgccctgggaattggaggcccagtcatcaggtgttataccagaaggaggtgttctattcactcagagcactgatacagtgaatcgtgagtcctttaagctctacggtcatgctgttgtgccttttggttctgctgtgtattggagcccttgcccaggtatgtggcttccagtaatttggtcttctgttaagtcatactctggtttgacttatacaggagtagttggttgtaaggcaattgttcaagagacagacgctatatgtcgttctctgtatatggattatgtccagcacaagtgtggcaatctcgagcagagagctatccttggattggacgatgtctatcatagacagttgcttgtgaataggggtgactatagtctcctccttgagaatgtggatttgtttgttaagcggcgcgctgaatttgcttgcaaattcgccacctgtggagatggtcttgtacccctcctactagatggtttagtgccccgcagttattatttgattaagagtggtcaagctttcacctctatgatggttaattttagccatgaggtgactgacatgtgtatggacatggctttattgttcatgcatgatgttaaagtggccactaagtatgttaagaaggttactggcaaactggccgtgcgctttaaagcgtggggtgtagccgttgtcagaaaaattactgaatggtttgatttagccgtggacattgctgctagtgccgctggatggctttgctaccagctggtaaatggcttatttgcagtggccaatggtgttataacctttgtacaggaggtgcctgagcttgtcaagaattttgttgacaagttcaaggcatttttcaaggttttgatcgactctatgtcggtttctatcttgtctggacttactgttgtcaagactgcctcaaatagggtgtgtcttgctggcagtaaggtttatgaagttgtgcagaaatctttgtctgcatatgttatgcctgtgggttgcagcgaagccacttgtttggtgggtgagattgaacctgcagtttttgaagatgatgttgttgatgtggttaaagccccattaacatatcaaggctgttgtaagccacccacttctttcgagaagatttgtattgtggataaattgtatatggccaagtgtggtgatcaattttaccctgtggttgttgataacgacactgttggcgtgttagatcagtgctggaggtttccctgtgcgggcaagaaagtcgagtttaacgacaagcccaaagtcaggaagataccctccacccgtaagattaagatcaccttcgcactggatgcgacctttgatagtgttctttcgaaggcgtgttcagagtttgaagttgataaagatgttacattggatgagctgcttgatgttgtgcttgacgcagttgagagtacgctcagcccttgtaaggagcatgatgtgataggcacaaaagtttgtgctttacttgataggttggcaggagattatgtctatctttttgatgagggaggcgatgaagtgatcgccccgaggatgtattgttccttttctgctcctgatgatgaagactgcgttgcagcggatgttgtagatgcagatgaaaaccaagatgatgatgctgaagactcagcagtccttgtcgctgatacccaagaagaggacggcgttgccaaggggcaggttgaggcggattcggaaatttgcgttgcgcatactggtagtcaagaagaattggctgagcctgatgctgtcggatctcaaactcccatcgcctctgctgaggaaaccgaagtcggagaggcaagcgacagggaagggattgctgaggcgaaggcaactgtgtgtgctgatgctgtagatgcctgccccgatcaagtggaggcatttgaaattgaaaaggttgaagactctatcttggatgagcttcaaactgaacttaatgcgccagcggacaagacctatgaggatgtcttggcattcgatgccgtatgctcagaggcgttgtctgcattctatgctgtgccgagtgatgagacgcactttaaagtgtgtggattctattcgcctgctatagagcgcactaattgttggctgcgttctactttgatagtaatgcagagtctacctttggaatttaaagacttggagatgcaaaagctctggttgtcttacaaggccggctatgaccaatgctttgtggacaaactagttaagagcgtgcccaagtctattatccgtccacaaggtggttatgtggcagattttgcctatttctttctaagccagtgtagctttaaagcttatgctaactggcgttgtttagagtgtgacatggagttaaagcttcaaggcttggacgccatgtttttctatggggacgttgtgtctcatatgtgcaagtgtggtaatagcatgaccttgttgtctgcagatataccctacactttgcattttggagtgcgagatgataagttttgcgctttttacacgccaagaaaggtctttagggctgcttgtgcggtagatgttaatgattgtcactctatggctgtagtagagggcaagcaaattgatggtaaagtggttaccaaatttattggtgacaaatttgattttatggtgggttacgggatgacatttagtatgtctccttttgaactcgcccagttatatggttcatgtataacaccaaatgtttgttttgttaaaggagatgttataaaggttgttcgcttagttaatgctgaagtcattgttaaccctgctaatgggcgtatggctcatggtgcaggtgttgcaggtgctatagctgaaaaggcgggcagtgcttttattaaagaaacctccgatatggtgaaggctcagggcgtttgccaggttggtgaatgctatgaatctgccggtggtaagttatgtaaaaaggtgcttaacattgtagggccagatgcgcgagggcatggcaagcaatgctattcacttttagagcgtgcttatcagcatattaataagtgtgacaatgttgtcactactttaatttcggctggtatatttagtgtgcctactgatgtctccctaacttacttacttggtgtagtgacaaagaatgtcattcttgtcagtaacaaccaggatgattttgatgtgatagagaagtgtcaggtgacctccgttgctggtaccaaagcgctatcacttcaattggccaaaaatttgtgccgtgatgtaaagtttgtgacgaatgcatgtagttcgctttttagtgaatcttgctttgtctcaagctatgatgtgttgcaggaagttgaagcgctgcgacatgatatacaattggatgatgatgctcgtgtctttgtgcaggctaatatggactgtctgcccacagactggcgtctcgttaacaaatttgatagtgttgatggtgttagaaccattaagtattttgaatgcccgggcgggatttttgtatccagccagggcaaaaagtttggttatgttcagaatggttcatttaaggaggcgagtgttagccaaataagggctttactcgctaataaggttgatgtcttgtgtactgttgatggtgttaacttccgctcctgctgcgtagcagagggtgaagtttttggcaagacattaggttcagtcttttgtgatggcataaatgtcaccaaagttaggtgtagtgccatttacaagggtaaggttttctttcagtacagtgatttgtccgaggcagatcttgtggctgttaaagatgcctttggttttgatgaaccacaactgctgaagtactacactatgcttggcatgtgtaagtggccagtagttgtttgtggcaattattttgctttcaagcagtcaaataataattgctatataaatgtggcatgtttaatgctgcaacacttgagtttaaagtttcctaagtggcaatggcaagaggcttggaacgagttccgctctggtaaaccactaaggtttgtgtccttggtattagcaaagggcagctttaaatttaatgaaccttctgattctatcgattttatgcgtgtggtgctacgtgaagcagatttgagtggtgccacgtgcaatttggaatttgtttgtaaatgtggtgtgaagcaagagcagcgcaaaggtgttgacgctgttatgcattttggtacgttggataaaggtgatcttgtcaggggttataatatcgcatgtacgtgcggtagtaaacttgtgcattgcacccaatttaacgtaccatttttaatttgctccaacacaccagagggtaggaaactgcccgacgatgttgttgcagctaatatttttactggtggtagtgtgggccattacacgcatgtgaaatgtaaacccaagtaccagctttatgatgcttgtaatgttaataaggtttcggaggctaagggtaattttaccgattgcctctaccttaaaaatttaaagcaaactttttcgtctgtgctgacgactttttatttagatgatgtaaagtgtgtggagtataagccagatttatcgcagtattactgtgagtctggtaaatattatacaaaacccattattaaggcccaatttagaacatttgagaaggttgatggtgtctataccaactttaaattggtgggacatagtattgctgaaaaactcaatgctaagctgggatttgattgtaattctccctttgtggagtataaaattacagagtggccaacagctactggagatgtggtgttggctagtgatgatttgtatgtgagtcggtactcaagcgggtgcattacttttggtaaaccggttgtctggcttggccatgaggaagcatcgctgaaatctctcacatattttaatagacctagtgtcgtttgtgaaaataaatttaatgtgttgcccgttgatgtcagtgaacccacggacaaggggcctgtgcctgctgcagtccttgttaccggcgtccctggagctgatgcgtcagctggtgccggtattgccaaggagcaaaaagcctgtgcttctgctagtgtggaggatcaggttgttacggaggttcgtcaagagccatctgtttcagctgctgatgtcaaagaggttaaattgaatggtgttaaaaagcctgttaaggtggaaggtagtgtggttgttaatgatcccactagcgaaaccaaagttgttaaaagtttgtctattgttgatgtctatgatatgttcctgacagggtgtaagtatgtggtttggactgctaatgagttgtctcgactagtaaattcaccgactgttagggagtatgtgaagtggggtatgggaaagattgtaacacccgctaagttgttgttgttaagagatgagaagcaagagttcgtagcgccaaaagtagtcaaggcgaaagctattgcctgctattgtgctgtgaagtggtttctcctctattgttttagttggataaagtttaatactgataataaggttatatacaccacagaagtagcttcaaagcttactttcaagttgtgctgtttggcctttaagaatgccttacagacgtttaattggagcgttgtgtctaggggctttttcctagttgcaacggtctttttattatggtttaactttttgtatgctaatgttattttgagtgacttctatttgcctaatattgggcctctccctacgtttgtgggacagatagttgcgtggtttaagactacatttggtgtgtcaaccatctgtgatttctaccaggtgacggatttgggctatagaagttcgttttgtaatggaagtatggtatgtgaactatgcttctcaggttttgatatgctggacaactatgatgctataaatgttgttcaacacgttgtagataggcgtttgtcctttgactatattagcctatttaaattagtagttgagcttgtaatcggctactctctttatactgtgtgcttctacccactgtttgtccttattggaatgcagttgttgaccacatggttgcctgaattctttatgctggagactatgcattggagtgctcgtttgtttgtgtttgttgccaatatgcttccagcttttacgttactgcgattttacatcgtggtgacagctatgtataaggtctattgtctttgtagacatgttatgtatggatgtagtaagcctggttgcttgttttgttataagagaaaccgtagtgtccgtgttaagtgtagcaccgttgttggtggttcactacgctattacgatgtaatggctaacggcggcacaggtttctgtacaaagcaccagtggaactgtcttaattgcaattcctggaaaccaggcaatacattcataactcatgaagcagcggcggacctctctaaggagttgaaacgccctgtgaatccaacagattctgcttattactcggtcacagaggttaagcaggttggttgttccatgcgtttgttctacgagagagatggacagcgtgtttatgatgatgttaatgctagtttgtttgtggacatgaatggtctgctgcattctaaagttaaaggtgtgcctgaaacgcatgttgtggttgttgagaatgaagctgataaagctggttttctcggcgccgcagtgttttatgcacaatcgctctacagacctatgttgatggtggaaaagaaattaataactaccgccaacactggtttgtctgttagtcgaactatgtttgacctttatgtagattcattgctgaacgtcctcgacgtggatcgcaagagtctaacaagttttgtaaatgctgcgcacaactctctaaaggagggtgttcagcttgaacaagttatggatacctttattggctgtgcccgacgtaagtgtgctatagattctgatgttgaaaccaagtctattaccaagtccgtcatgtcggcagtaaatgctggcgttgattttacggatgagagttgtaataacttggtgcctacctatgttaaaagtgacactatcgttgcagccgatttgggtgttcttattcagaataatgctaagcatgtacaggctaatgttgctaaagccgctaatgtggcttgcatttggtctgtggatgcttttaaccagctatctgctgacttacagcataggctgcgaaaagcatgttcaaaaactggcttgaagattaagcttacttataataagcaggaggcaaatgttcctattttaactacaccgttctctcttaaagggggcgctgtttttagtagaatgttacaatggttgtttgttgctaatttgatttgtttcattgtgttgtgggcccttatgccaacatatgcagtgcacaaatcggatatgcagttgcctttatatgccagttttaaagttatagataatggtgtgctaagggatgtgtctgttactgacgcatgcttcgcaaacaaatttaatcaatttgatcaatggtatgagtctacttttggtcttgcttattaccgcaactctaaggcttgtcctgttgtggttgctgtaatagatcaagacattggccataccttatttaatgttcctaccacagttttaagatatggatttcatgtgttgcattttataacccatgcatttgctactgatagcgtgcagtgttacacgccacatatgcaaatcccctatgataatttctatgctagtggttgcgtgttgtcatccctctgtactatgcttgcgcatgcagatggaaccccgcatccttattgttatacagggggtgttatgcacaatgcctctctgtatagttctttggctcctcatgtccgttataacctggctagttcaaatggttatatacgttttcccgaagtggttagtgaaggcattgtgcgtgttgtgcgcactcgctctatgacctactgcagggttggtttatgtgaggaggccgaggagggtatctgctttaattttaatcgttcatgggtattgaacaacccgtattatagggccatgcctggaactttttgtggtaggaatgcttttgatttaatacatcaagttttaggaggattagtgcggcctattgatttctttgccttaacggcgagttcagtggctggtgctatccttgcaattattgtcgttttggctttctattatttaataaagcttaaacgtgcctttggtgactacactagtgttgtggttatcaatgtaattgtgtggtgtataaattttctgatgctttttgtgtttcaggtttatcccacattgtcttgtttatatgcttgtttttatttctacacaacgctttatttcccttcggagataagtgttgttatgcatttgcaatggcttgtcatgtatggtgctattatgcccttgtggttttgcattatttacgtggcagtcgttgtttcaaaccatgcattgtggttgttctcttactgccgcaaaattggtaccgaggttcgtagtgacggcacatttgaggaaatggcccttactacctttatgattactaaagaatcttattgtaagttgaaaaattctgtttctgatgttgcttttaacaggtacttgagtctttataacaagtatcgttattttagtggcaaaatggatactgccgcttatagagaggctgcctgttcacaactggcaaaggcaatggaaacatttaaccataataatggtaatgatgttctctatcagcctccaaccgcctctgttactacatcatttttacagtctggtatagtgaagatggtgtcgcccacctctaaagtggagccttgtattgttagtgttacttatggtaacatgacacttaatgggttgtggttggatgataaagtttattgcccaagacatgttatctgttcttcagctgacatgacagaccctgattatcctaatttgctttgtagagtgacatcaagtgatttttgtgttatgtctggtcgtatgagccttactgtaatgtcttatcaaatgcagggctgccaacttgttttgactgttacactgcaaaatcctaacacgcctaagtattccttcggtgttgttaagcctggtgagacatttactgtactggctgcatacaatggcagacctcaaggagccttccatgttacgcttcgtagtagccataccataaagggctcctttctatgtggatcctgcggttctgtaggatatgttttaactggcgatagtgtacgatttgtttatatgcatcagctagagttgagtactggttgtcataccggtactgactttagtgggaacttttatggtccctatagagatgcgcaagttgtacaattgcctgttcaggattatacgcagactgttaatgttgtagcttggctttatgctgctatttttaacagatgcaactggtttgtgcaaagtgatagttgttccctggaggagtttaatgtttgggctatgaccaatggttttagctcaattaaagccgatcttgtcttggatgcgcttgcttctatgacaggcgttacagttgaacaggtgttggccgctattaagaggctgcattctggattccagggcaaacaaattttaggtagttgtgtgcttgaagatgagctgacaccaagtgatgtttatcaacaactagctggtgtcaagctacagtcaaagcgcacaagagttataaaaggtacatgttgctggatattggcttcaacgtttttgttctgtagcattatctcagcatttgtaaaatggactatgtttatgtatgttactacccatatgttgggagtgacattgtgtgcactttgttttgtaagctttgctatgttgttgatcaagcataagcatttgtatttaactatgtatattatgcctgtgttatgcacactgttttacaccaactatttggttgtgtacaaacagagttttagaggtctagcttatgcttggctttcacactttgtccctgctgtagattatacatatatggatgaagttttatatggtgttgtgttgctagtagctatggtgtttgttaccatgcgtagcataaaccacgacgtcttttctattatgttcttggttggtagacttgtcagcctggtatccatgtggtattttggagccaatttagaggaagaggtactattgttcctcacatccctatttggcacgtacacatggactactatgttgtcattggctaccgctaaggttattgctaaatggttggctgtgaatgtcttgtacttcacagacgtaccgcaaattaaattagttcttttgagctacttgtgtattggttatgtgtgttgttgttattggggaatcttgtcactccttaatagcatttttaggatgccatttggcgtctacaattataaaatctccgttcaggagttacgttatatgaatgctaatggcttgcgcccacctagaaatagttttgaggccctgatgcttaattttaagctgttgggaattggtggtgtgccagtcattgaagtatctcaaattcaatcaagattgacggatgttaaatgtgctaatgttgtgttgcttaattgcctccagcacttgcatattgcatctaattctaagttgtggcagtattgtagtactttgcacaatgaaatactggctacatctgatttgagcgtggccttcgataagttggctcagctcttagttgttttatttgctaatccagcagcagtggatagcaagtgccttgcaagtattgaagaagtgagcgatgattacgttcgcgacaatactgtcttgcaagccttacagagtgaatttgttaatatggctagcttcgttgagtatgaacttgctaagaagaatctagatgaggctaaggctagcggctctgccaatcaacagcagattaagcagctagagaaggcgtgtaatattgctaagtcagcatatgagcgcgacagagctgttgctcgtaagctggaacgtatggctgatttagctcttacaaacatgtataaagaagctagaattaatgataagaagagtaaggtagtgtctgcattgcaaaccatgctctttagtatggtgcgtaagctagataaccaagctcttaattctattttagataatgcagttaagggttgtgtacctttgaatgcaataccatcattgacttcgaacactctgactataatagtgccagataagcaggtttttgatcaggttgtggataatgtgtatgtcacctatgctgggaatgtatggcatatacagtttattcaagatgctgatggtgctgttaaacaattgaatgagatagatgttaattcaacctggcctctagtcattgctgcaaataggcataatgaagtgtctactgttgttttgcagaacaatgagttgatgcctcagaagttgagaactcaggttgtcaatagtggctcagatatgaattgtaatactcctacccagtgttactataatactactggcacgggtaagattgtgtatgctatacttagtgactgtgatggtctcaagtacactaagatagtaaaagaagatggaaattgtgttgttttggaattggatcctccctgtaagttttctgttcaggatgtgaagggccttaaaattaagtacctttactttgtgaaggggtgtaatacactggctagaggctgggttgtaggcaccttatcctcgacagtgagattgcaggcgggtacggcaactgagtatgcctgcaactctgcaatactgtcgctgtgtgcgttttctgtagatcctaagaaaacgtacttggattatataaaacagggtggagttcccgttactaattgtgttaagatgttatgtgaccatgctggcactggtatggccattactattaagccggaggcaaccactaatcaggattcttatggtggtgcttccgtttgtatatattgccgctcgcgtgttgaacatccagatgttgatggattgtgcaaattacgcggcaagtttgtccaagtgcccttaggcataaaagatcctgtgtcatatgtgttgacgcatgatgtttgtcaggtttgtggcttttggcgagatggtagctgttcctgtgtaggcacaggctcccagtttcagtcaaaagacacgaactttttaaacggattcggggtacaagtgtaaatgcccgtcttgtaccctgtgccagtggcttggacactgatgttcaattaagggcatttgacatttgtaatgctaatcgagctggcattggtttgtattataaagtgaattgctgccgcttccagcgtgtagatgaggacggcaacaagttggataagttctttgttgttaaaagaactaatttagaagtgtataataaggagaaagaatgctatgagttgacaaaagaatgcggtgttgtggctgaacacgagttcttcacatttgatgtggagggaagtcgggtaccacacatagtccgtaaagatctttcaaagtttactatgttagatctttgctatgcattgcgtcattttgaccgcaatgattgttcaactcttaaggaaattctccttacatatgctgagtgtgaagagtcctacttccaaaagaaggactggtatgattttgttgagaatcctgatataattaatgtgtataaaaagcttggtcctatatttaatagagccctgcttaacactgccaagtttgcagacgcattagtggaggcaggcttagtaggtgttttaacacttgataatcaagatttatatggtcaatggtatgactttggagattttgtcaagacagtacctggttgtggtgttgccgtggcagactcttattattcatatatgatgccaatgctgactatgtgtcatgcgttggatagtgagttgtttgttaatggtacttatagggagtttgaccttgttcagtatgattttactgatttcaagctagagctcttcactaagtattttaagcattggagtatgacctaccacccgaacacctgtgagtgcgaggatgacaggtgcattattcattgcgccaattttaatatactttttagtatggtcttacctaagacctgttttgggcctcttgttaggcagatatttgtggatggtgttcctttcgttgtgtcgatcggttaccattataaagaattaggtgttgttatgaatatggatgtggatacacatcgttatcgcttgtctcttaaggacttgcttttgtatgctgcagaccctgcccttcatgtggcgtctgctagtgcactgcttgatttgcgcacatgttgttttagcgttgcagctattacaagtggcgtaaaatttcaaacagttaaacctggaaattttaatcaggatttttatgagtttattttgagtaaaggcctgcttaaagaggggagctccgttgatttgaagcacttcttctttacgcaggatggtaatgctgctattactgattataattattacaagtataatctacccaccatggtggatattaagcagttgttgtttgttttagaagttgttaataagtattttgagatctatgagggtgggtgtatacccgcaacacaggtcattgttaataattatgataagagtgctggctatccatttaataaatttggaaaggccaggctctattatgaggcattatcatttgaggagcaggatgaaatttatgcgtataccaaacgcaatgtcctgccgaccctaactcaaatgaatcttaaatatgctattagtgctaagaatagggcccgcaccgttgctggtgtctctattctcagtactatgactggcagaatgtttcatcaaaagtgtctaaagagtatagcagctactcgcggtgttcctgtagttataggcaccacgaagttctatggcggttgggatgatatgttacgccgccttattaaagatgttgatagtcctgtactcatgggttgggactatcctaaatgtgatcgtgctatgccaaacatactgcgtattgttagtagtttggtgctagtccgtaaacatgattcgtgctgttcgcatacggatagattctatcgtcttgcgaacgagtgcgcccaagttttgagtgaaattgttatgtgtggtggttgttattatgttaaaccaggtggcactagtagtggggatgcaaccactgcttttgctaattctgtgtttaacatttgtcaagctgtttccgccaatgtatgctcgcttatggcatgcaatggacacaaaattgaagatttgagtatacgcgagttacaaaagcgcctatactctaatgtctatcgtgcggaccatgttgaccccgcatttgttagtgagtattatgagtttttaaataagcattttagtatgatgattttgagtgatgatggtgttgtgtgttataattcagagtttgcgtccaagggttatattgctaatataagtgcctttcaacaggtattatattatcaaaataatgtgtttatgtctgaggccaaatgttgggtagaaacagacatcgaaaagggaccgcatgaattttgttctcaacatacaatgctagtcaagatggatggtgatgaagtctaccttccataccctgatccttcgagaatcttaggagcaggctgttttgttgatgatttattaaagactgatagcgttctcttgatagagcgtttcgtaagtcttgcaattgatgcttatcctttagtataccatgagaacccagagtatcaaaatgtgttccgggtatatttagaatatataaagaagctgtacaatgatctcggtaatcagatcctggacagctacagtgttattttaagtacttgtgatggtcaaaagtttactgatgagaccttttacaagaacatgtatttaagaagtgcagtgctgcaaagcgttggtgcctgcgttgtctgtagttctcaaacatcattacgttgtggcagttgcatacgcaagcctttgctgtgttgcaaatgcgcctatgatcatgttatgtccactgatcataaatatgtcctgagtgtgtcaccatatgtgtgtaattcaccgggatgtgatgtaaatgatgttaccaaattgtatttaggtggtatgtcatattattgtgaggaccataaaccacagtattcattcaaattggtgatgaatggtatggtttttggtttatataaacaatcttgtactggttcgccctacatagaggattttaataaaatagctagttgcaaatggacagaagtcgatgattatgtgctagctaatgaatgcaccgaacgccttaaattgtttgccgcagaaacgcagaaggccacagaagaggcctttaagcaatgttatgcgtcagcaacgatccgtgagatcgtgagcgatcgggagttaattttatcttgggaaattggtaaagtgagaccaccacttaataaaaattatgtttttactggctaccattttactaataatggtaagacagttttaggtgagtatgtttttgataagagtgagttgactaatggtgtgtattatcgcgccacaaccacttataagttatctgtaggtgatgtgttcattttaacatcacacgcagtgtctagtttaagtgctcctacattagtaccgcaggagaattatactagcattcgttttgctagtgtttatagtgtgcctgagacgtttcagaataatgtgcctaattatcagcacattggaatgaagcgctattgtactgtacagggaccgcctggtactggtaagtcccatctagccattgggctagctgtttattattgtacagcgcgcgtggtgtataccgctgctagccatgctgcagttgacgcgctgtgtgaaaaggcacataaatttttaaatattaatgactgcacgcgtattgttcctgcaaaggtgcgtgtagattgttatgataaatttaaggtcaatgacaccactcgcaagtatgtgtttactacaataaatgcattacctgagttggtgactgacattattgtcgttgatgaagttagtatgcttaccaactatgagctgtctgttattaacagtcgtgttagggctaagcattatgtgtatattggagaccctgcgcagttacctgcaccacgtgtgctactgaataagggaactctagaacctagatattttaattccgttaccaagctaatgtgttgtttgggtccagatattttcttgggcacctgttatagatgccctaaggagattgtggatacggtgtcagccttggtttataataataagctgaaggctaaaaatgataatagctccatgtgctttaaggtttattataagggccagactacacatgagagttctagtgctgttaatatgcagcaaatacatttaattagtaagtttttaaaggcaaaccccagttggagtaacgccgtatttattagtccttataatagtcagaactatgttgctaagagagtcttgggattacaaacccagacagtagactcagcgcagggttctgaatatgattttgttatttattcacagactgcggaaacagcgcattctgtcaatgtaaatagattcaatgttgctattacacgtgctaagaagggtattctttgtgtcatgagtagtatgcaattatttgagtctcttaattttactacactgacgttggataagattaacaatccacgattacagtgtactacaaatttgtttaaggattgtagcaggagctatgtaggatatcacccagcccatgcaccatcctttttggcagttgatgacaaatataaggtaggcggtgatttagccgtttgccttaatgttgctgattctgctgtcagttattcgcggcttatatcactcatgggattcaagcttgacttgacccttgatggttattgtaagctgtttataactagagatgaagctatcaaacgtgttagagcctgggttggcttcgatgcagaaggtgcccatgcgatacgtgatagcattgggacaaatttcccattacaattaggcttttcgactggaattgattttgttgtcgaagccactggaatgtttgctgagagagatggttatgtctttaaaaaggcagccgcacgagctcctcctggcgaacaatttaaacaccttatcccacttatgtcaagagggcagaaatgggatgtggttcgaattagaatagtacaaatgttgtcagaccacctagtggatttggcagacagtgttgtacttgtgacgtgggctgccagctttgagctcacatgtttgcgatatttcgctaaagttggaagagaagttgtgtgtagtgtctgcaccaagcgtgcgacatgttttaattctagaactggatactatggatgctggcgacatagttattcctgtgattacctgtacaacccactaatagttgacattcaacagtggggatatacaggatctttaactagcaatcatgatcctatttgcagcgtgcataagggtgctcatgttgcatcatctgatgctatcatgacccggtgtctagctgttcatgattgcttttgtaagtctgttaattggaatttagaataccccattatttcaaatgaggtcagtgttaatacctcctgcaggttattgcagcgcgtaatgtttagggctgcgatgctatgcaataggtatgatgtgtgttatgacattggcaaccctaaaggtcttgcctgtgtcaaaggatatgattttaagttttatgatgcctcccctgttgttaagtctgttaaacagtttgtttataaatacgaggcacataaagatcaatttttagatggtttgtgtatgttttggaactgcaatgtggataagtatccagcgaatgcagttgtgtgtaggtttgacacgcgtgtgttgaacaaattaaatctccctggctgtaatggtggcagtttgtatgttaacaaacatgcattccacaccagtccctttacccgggctgccttcgagaatttgaagcctatgcctttcttttattattcagatacgccctgtgtgtatatggaaggcatggaatctaagcaggtcgattatgtcccattgagaagcgctacatgcatcacaagatgcaatttaggtggcgctgtttgtttaaaacatgctgaggagtatcgtgagtaccttgagtcttacaatacggcaaccacagcgggttttactttttgggtctataagacttttgatttttataacctttggaatacttttactaggctccaaagtttagaaaatgtagtgtataatttggtcaatgctggacactttgatggccgggcgggtgaactgccttgtgctgttataggtgagaaagtcattgccaagattcaaaatgaggatgtcgtggtctttaaaaataacacgccattccccactaatgtggctgtcgaattatttgctaagcgcagtattcggccccaccccgagcttaagctctttagaaatttgaatattgacgtgtgctggagtcacgtcctttgggattatgctaaggatagtgtgttttgcagttcgacgtataaggtctgcaaatacacagatttacagtgcattgaaagcttgaatgtactttttgatggtcgtgataatggtgctcttgaagcttttaagaagtgccggaatggcgtctacattaacacgacaaaaattaaaagtctgtcgatgattaaaggcccacaacgtgccgatttgaatggcgtagttgtggagaaagttggagattctgatgtggaattttggtttgctgtgcgtaaagacggtgacgatgttatcttcagccgtacagggagccttgaaccgagccattaccggagcccacaaggtaatccgggtggtaatcgcgtgggtgatctcagcggtaatgaagctctagcgcgtggcactatctttactcaaagcagattattatcttctttcacacctcgatcagagatggagaaagattttatggatttagatgatgatgtgttcattgcaaaatatagtttacaggactacgcgtttgaacacgttgtttatggtagttttaaccagaagattattggaggtttgcatttgcttattggcttagcccgtaggcagcaaaaatccaatctggtaattcaagagttcgtgacatacgactctagcattcattcgtactttatcactgacgagaacagtggtagtagtaagagtgtgtgcactgttattgatttattgttagatgattttgtggacattgtaaagtccctgaatctaaagtgtgtgagtaaggttgttaatgttaatgttgattttaaagatttccagtttatgttgtggtgcaatgaggagaaggtcatgactttctatcctcgtttgcaggctgctgctgactggaaacctggttatgttatgcctgtcttatataagtatttggaatcgcctctggaaagagtaaacctctggaattatggcaagccgattactttacctacaggatgtatgatgaatgttgctaagtatactcaattatgtcaatatttgagcactacaacattagcagttccggctaatatgcgtgtcttacaccttggtgccggttcggataagggtgttgcccctgggtctgcagttcttaggcagtggctaccagcgggaagtattcttgtagataatgatgtgaatccatttgtgagtgacagtgtcgcctcatattatggaaattgtataaccttaccctttgattgtcagtgggatctgataatttctgatatgtacgaccctcttactaagaacattggggagtacaacgtgagtaaagatggattctttacttacctctgtcatttaattcgtgacaagttggctctgggtggcagtgttgccataaaaataacagagttttcttggaacgctgagttatatagtttaatggggaagtttgcgttctggacaatcttttgcaccaacgtaaacgcctcttcaagtgaaggatttttgattggcataaattggttgaataagacccgtaccgaaattgacggtaaaaccatgcatgccaattatctgttttggagaaatagtacaatgtggaatggaggggcttacagtctctttgacatgagtaagttccctttgaaagcggctggtacggctgttgttagccttaaaccagaccaaataaatgacttagtcctctccttgattgagaagggcaagttattagtgcgtgatacacgcaaagaagtttttgttggcgatagcctagtaaatgtcaaataaatctatacttgtcgtggctgtgaaaatggcctttgctgacaagcctaatcatttcataaactttcccctggcccaatttagtggctttatgggtaagtatttaaagctacagtctcaacttgtggaaatgggtttagactgtaaattacagaaggcaccacatgttagtattaccctgcttgatattaaagcagaccaatacaaacaggtggaatttgcaatacaagaaataatagatgatctggcggcatatgagggagatattgtctttgacaaccctcacatgcttggcagatgccttgttcttgatgttagaggatttgaagagttgcatgaagatattgttgaaattctccgcagaaggggttgcacggcagatcaatccagacactggattccgcactgcactgtggcccaatttgacgaagaaagagaaacaaaaggaatgcaattctatcataaagaacccttctacctcaagcataacaacctattaacggatgctgggcttgagctcgtgaagataggttcttccaaaatagatgggttttattgtagtgaactgagtgtttggtgtggtgagaggctttgttataagcctccaacacccaaattcagtgatatatttggctattgctgcatagataaaatacgtggtgatttagaaataggagacctaccgcaggatgatgaggaagcgtgggccgagctaagttaccactatcaaagaaacacctacttcttcagacatgtgcacgataatagcatctattttcgtaccgtgtgtagaatgaagggttgtatgtgttgatttgtttttacactattagtgtaataagcttattattttgttgaaaagggcaggatgtgcatagctatggctcctcgcacactgcttttgctgatttgatgtcagctggtgtttgggttcaatgaacctcttaacatcgtttcacatttaaatgatgactggtttctatttggtgacagtcgttctgactgtacctatgtagaaaataacggtcatcctaaattagattggcttgacctcgacccaaagttgtgtaattcaggaaagatttccgcaaagagtggtaactctctctttaggagttttcacttcactgatttttacaattatacgggtgagggagaccaaattgtattttatgaaggagttaattttagtcccagccatggctttaaatgcctggctcatggagataataaaagatggatgggcaataaagctcgattttatgcccgagtgtatgagaagatggcccaatataggagcctatcgtttgttaatgtgtcttatgcctatggaggtaatgcaaagcccgcctccatttgcaaagacaatactttaacactcaataaccccaccttcatatcgaaggagtctaattatgttgattagtaccgctctgtggtttaatggccattccaagggcagctcttcggatgctgccaataaatattatactgactctcagagttactataatatggatattggtgtcttatatgggttcaattcgaccttggatgttggcaacactgctaaggatccgggtcttgatctcacttgcaggtatcttgcattgactcctggtaattataaggctgtgtccttagaatatttgttaagcttaccctcaaaggctatttgcctccataagacaaagcgctttatgcctgtgcaggtagttgactcaaggtggagtagcatccgccagtcagacaatatgaccgctgcagcctgtcagctgccatattgtttctttcgcaacacatctgcgaattatagtggtggcacacatgatgcgcaccatggtgattttcatttcaggcagttattgtctggtttgttatataatgtttcctgtattgcccagcagggtgcatttctttataataatgttagttcctcttggccagcctatgggtacggtcattgtccaacggcagctaacattggttatatggcacctgtttgtatctatgaccctctcccggtcatactgctaggtgtgttattgggtatagctgtgttgattattgtgtttttgatgttttattttatgacggatagcggtgttagattgcatgaggcataatctaaacatgctgttcgtgtttattctatttttgccctcttgtttagggtatattggtgattttagatgtatccagcttgtgaattcaaacggtgctaatgttagtgctccaagcattagcactgagaccgttgaagtttcacaaggcctggggacatattatgtgttagatcgagtttatttaaatgccacattattgcttactggttactacccggtcgatggttctaagtttagaaacctcgctcttacgggaactaactcagttagcttgtcgtggtttcaaccaccctatttaagtcagtttaatgatggcatatttgcgaaggtgcagaaccttaagacaagtacgccatcaggtgcaactgcatattttcctactatagttataggtagtttgtttggctatacttcctataccgttgtaatagagccatataatggtgttataatggcctcagtgtgccagtataccatttgtcagttaccttacactgattgtaagcctaacactaatggtaataagcttatagggttttggcacacggatgtaaaacccccaatttgtgtgttaaagcgaaatttcacgcttaatgttaatgctgatgcattttattttcatttttaccaacatggtggtactttttatgcgtactatgcggataaaccctccgctactacgtttttgtttagtgtatatattggcgatattttaacacagtattatgtgttacctttcatctgcaacccaacagctggtagcacttttgctccgcgctattgggttacacctttggttaagcgccaatatttgtttaatttcaaccagaagggtgtcattactagtgctgttgattgtgctagtagttataccagtgaaataaaatgtaagacccagagcatgttacctagcactggtgtctatgagttatccggttatacggtccaaccagttggagttgtataccggcgtgttgctaacctcccagcttgtaatatagaggagtggcttactgctaggtcagtccccagccctctcaactgggagcgtaagacttttcagaattgtaattttaatttaagcagcctgttacgttatgttcaggctgagagtttgttttgtaataatatggatgcttccaaagtgtatggcaggtgctttggtagtatttcagttgataagtttgctgtaccccgaagtaggcaagttgatttacagcttggtaactctggatttctgcagactgctaattataagattgatacagctgccacttcgtgtcagctgcattacaccttgcctaagaataatgtcaccataaacaaccataacccctcgtcttggaataggaggtatggctttaatgatgctggcgtctttggcaaaaaccaacatgacgttgtttacgctcagcaatgttttactgtaagatctagttattgcccgtgtgctcaaccggacatagttagcccttgcactactcagactaagcctaagtctgcttttgttaatgtgggtgaccattgtgaaggcttaggtgttttagaagataattgtggcaatgctgatccacataagggttgtatctgtgccaacaattcatttattggatggtcacatgatacctgccttgttaatgatcgctgccaaatttttgctaatatattgttaaatggcattaatagtggtaccacatgttccacagatttgcagttgcctaatactgaagtggttactggcatttgtgtcaaatatgacctctacggtattactggacaaggtgtttttaaagaggttaaggctgactattataatagctggcaaacccttctgtatgatgttaatggtaatttgaatggttttcgtgatcttaccactaacaagacttatacgataaggagctgttatagtggccgtgtttctgctgcatttcataaagatgcacccgaaccggctctaatctatcgtaatataaattgtagctatgtttttagcaataatatttcccgtgaggagaacccacttaattactttgatagttatttgggttgtgttgttaatgctgataaccgcacggatgaggcgcttcctaattgtgatctccgtatgggtgctggcttatgcgttgattattcaaaatcacgcagggctcaccgatcagtttctactggctatcggttaactacatttgagccatacactccgatgttagttaatgatagtgtccaatccgttgatggattatatgagatgcaaataccaaccaattttactattgggcaccatgaggagttcattcaaactagatctccaaaggtgactatagattgtgctgcatttgtctgtggtgataacactgcatgcaggcagcagttggttgagtatggctctttctgtgttaatgttaatgccattcttaatgaggttaataacctcttggataatatgcaactacaagttgctagtgcattaatgcagggtgttactataagctcgagactgccagacggcatctcaggccctatagatgacattaattttagtcctctacttggatgcataggttcaacatgtgctgaagacggcaatggacctagtgcaatccgagggcgttctgctatagaggatttgttatttgacaaggtcaaattatctgatgttggctttgtcgaggcttataataattgcaccggtggtcaagaagttcgtgacctcctttgtgtacaatcttttaatggcatcaaagtattacctcctgtgttgtcagagagtcagatctctggctacacaaccggtgctactgcggcagctatgttcccaccgtggtcagcagctgccggtgtgccatttagtttaagtgttcaatatagaattaatggtttaggtgtcactatgaatgtgcttagtgagaaccaaaagatgattgctagtgcttttaacaatgcgctgggtgctatccaggatgggtttgatgcaaccaattctgctttaggtaagatccagtccgttgttaatgcaaatgctgaagcactcaataacttactaaatcaactttctaacaggtttggtgctattagtgcttctttacaagaaattctaactcggcttgaggctgtagaagcaaaagcccagatagatcgtcttattaatggcaggttaactgcacttaatgcgtatatatccaagcaacttagtgatagtacgcttattaaagttagtgctgctcaggccatagaaaaggtcaatgagtgcgttaagagccaaaacacgcgtattaatttctgtggcaatggtaatcatatattatctcttgtccagaatgcgccttatggcttatattttatacacttcagctatgtgccaatatcctttacaaccgcaaatgtgagtcctggactttgcatttctggtgatagaggattagcacctaaagctggatattttgttcaagatgatggagaatggaagttcacaggcagttcatattactaccctgaacccattacagataaaaacagtgtcattatgagtagttgcgcagtaaactacacaaaggcacctgaagttttcttgaacacttcaatacctaatccacccgactttaaggaggagttagataaatggtttaagaatcagacgtctattgcgcctgatttatctctcgatttcgagaagttaaatgttactttgctggacctgacgtatgagatgaacaggattcaggatgcaattaagaagttaaatgagagctacatcaacctcaaggaagttggcacatatgaaatgtatgtgaaatggccttggtatgtttggttgctaattggattagctggtgtagctgtttgtgtgttgttattctttatatgttgctgcacaggttgtggctcatgttgttttaagaagtgtggaaattgttgtgatgagtatggaggacaccaggacagtattgtgatacataatatttcctctcatgaggattgactatcacagcctctcctggaaagacagaaaatctaaacaatttatagcattctcattgctacctggccccgtaagaggcagtcatagctatggccttgttggtcctaaggctacattggctgctgtctttattggtccatttattgtagcatgtatgctaggcattggcctagtttatttattgcaattgcaagttcaaatttttcatgttaaggataccatacgtgtgactggcaagccagccactgtgtcttatactacaagtacaccagtaacaccgagcgcgacgacgctcgatggtactacgtatactttaattagacccactagctcttatacaagagtttatcttggtactccaagaggttttgattatagtacatttgggcctaagaccctagattatgttactaatctaaacctcatcttaattctggtcgtccatatacttttaaggcattgtccaggcatatgagaccaacagccacatggatttggcatgtgagtgatgcatggttacgccgcacgcgggactttggtgtcattcgcctagaagatttttgttttcaatttaattatagccaaccccgagttggttattgtagagttcctttaaaggcttggtgtagcaaccagggtaaatttgcagcgcagtttaccctaaaaagttgcgaaaaaccaggtcacgaaaaatttattactagcttcacggcctacggcagaactgtccaacaggccgttagcaagttagtagaagaagctgttgattttattctttttagggccacgcagctcgaaagaaatgtttaatttattccttacagacacagtatggtatgtggggcagattatttttatattcgcagtgtgtttgatggtcaccataattgtggttgccttccttgcgtctatcaaactttgtattcaactttgcggtttatgtaatactttggtgctgtccccttctatttatttgtatgataggagtaagcagctttataagtattataatgaagaaatgagactgcccctattagaggtggatgatatctaatccaaacattatgagtagtactactcaggccccagagcccgtctatcaatggacggccgacgaggcagttcaattccttaaggaatggaacttctcgttgggcattatactactctttattactatcatactacagttcggttacacgagccgtagcatgtttatttatgttgtgaaaatgataatcttgtggttaatgtggccactgactattgttttgtgtattttcaattgcgtgtatgcgctaaataatgtgtatcttggattttctatagtgtttactatagtgtccattgtaatctggattatgtattttgttaatagcataaggttgtttatcaggactggtagctggtggagcttcaaccccgaaacaaacaaccttatgtgtatagatatgaaaggtaccgtgtatgttagacccattattgaggattaccatacactaacagccactattattcgtggccacctctacatgcaaggtgttaagctaggcaccggtttctctttgtctgacttgcccgcttatgttacagttgctaaggtgtcacacctttgcacttataagcgcgcattcttagacaaggtagacggtgttagcggttttgctgtttatgtgaagtccaaggtcggaaattaccgactgccctcaaacaaaccgagtggcgcggacaccgcattgttgagaacctaatctaaactttaaggatgtcttttgttcctgggcaagaaaatgccggtggcagaagctcctctgtaaaccgcgctggtaatggaatcctcaagaagaccacttgggctgaccaaaccgagcgtggaccaaataatcaaaatagaggcagaaggaatcagccaaagcagactgcaactactcaacccaactccgggagtgtggttccccattactcctggttttctggcattacccagttccaaaagggaaaggagtttcagtttgcagaaggacaaggagtgcctattgccaatggaatccccgcttcagagcaaaagggatattggtatagacacaaccgccgttcttttaaaacacctgatgggcagcagaagcagctactgcccagatggtatttttactatcttggcacagggccacatgctggagccagttatggagacagcattgaaggagtcttctgggttgcaaacagccaagcggacaccaatacccgctctgatattgtcgaaagggacccaagcagtcatgaggctattcctactaggtttgcgcccggcacggtattgcctcagggcttttatgttgaaggctctggaaggtctgcacctgctagccgatctggttcgcggtcacaatcccgtgggccaaataatcgcgctagaagcagttccaaccagcgccagcctgcctctactgtaaaacctgatatggccgaagaaattgctgctcttgttttggctaagctcggtaaagatgccggccagcccaagcaagtaacgaagcaaagtgccaaagaagtcaggcagaaaattttaaacaagcctcgccaaaagaggactccaaacaagcagtgcccagtgcagcagtgttttggaaagagaggccccaatcagaattttggaggctctgaaatgttaaaacttggaactagtgatccacagttccccattcttgcagagttggctccaacagttggtgccttcttctttggatctaaattagaattggtcaaaaagaattctggtggtgctgatgaacccaccaaagatgtgtatgagctgcaatattcaggtgcagttagatttgatagtactctacctggttttgagactatcatgaaagtgttgaatgagaatttgaatgcctaccagaaggatggtggtgcagatgtggtgagcccaaagccccaaagaaaagggcgtagacaggctctggaaaagaaagatgaagtagataatgtaagcgttgcaaagcccaaaagctctgtgcagcgaaatgtaagtagagaattaaccccagaggatagaagtctgttggctcagatccttgatgatggcgtagtgccagatgggttagaagatgactctaatgtgtaaagagaatgaatcctatgtcggcgctcggtggtaacccctcgcgagaaagtcgggataggacactctctatcagaatggatgtcttgctgtcataacagatagagaaggttgtggcagaccctgtatcaattagttgaaagagattgcaaaatagagaatgtgtgagagaagttagcaaggtcctacgtctaaccataagaacggcgataggcgccccctgggaagagctcacatcagggtactattcctgcaaaaaaaaaaa

SEQ ID NO: 40 - DNA, 31277 bp, Coronavirus
ataagagtgattggcgtccgtacgtaccctttctactctcaaactcttgttagtttaaatctaatctaaactttataaacggcacttcctgtgtgtccatgcccgtgggcttggtcttgtcatagtgctgacatttgtggttccttggtttttgttctctgccagtgacgtgtccattcggcgccagcagcccacccataggttgcataatggcaaagatgggcaaatacggtctcggcttcaaatgggccccagaatttccatggatgcttccgaacgcatcggagaagttgggtagccctgagaggtcagaggaggatgggttttgcccctctgctgcgcaagaaccaaaaactaaaggaaaaactttgattaatcacgtgagggtggattgtagccggcttccagcattggagtgctgtgttcagtctgccataatccgtgatatttttgttgatgaggatcccttgaatgtggaggcctcaactatgatggcattgcagttcggtagtgctgtcttggtcaagccatccaagcgcttgtctattcaggcatgggctaagttgggtgtgctgcctaaaactccagccatggggttgttcaagcgcttctgcctgtgtaacaccagggagtgcgtttgtgacgcccacgtggcttttcaactttttacggtccagcctgatggtgtatgcctgggcaatggccgttttataggctggtttgtgccagtcacagccataccggcgtatgcgaagcagtggttgcaaccctggtccatccttcttcgtaagggtggtaacaaagggtctgtaacatccggccatttccgccgcgctgttaccatgcctgtgtatgactttaatgtggaggatgcttgtgaggaggttcatcttaacccgaagggtaagtactcccgcaaggcgtatgctcttcttaagggctatcgcggtgttaaatccatcctattcttggaccagtatggttgtgactatactgggcgtctcgccaagggtcttgaagactatggcgattgtactttggaagagatgaaggagttgtttcctgtgtggtgtgactccttggataatgaagttgttgtggcctggcatgttgatcgggatcctcgggctgttatgcgcttgcagactcttgctactatacgtagcattggttatgtgggccaaccgaccgaggatttggttgatggagatgtggtagtgcgtgagcctgctcatctcctagcagccaatgccatcgtcaaaaggctcccccgcctggtggagactatgctgtatacggactcttccgttacagaattttgttataaaactaagttgtgtgattgtggttttatcacgcagtttggttatgtggattgctgtggtgatgcctgcgattttcgtgggtgggttcctggcaatatgatggatggctttctttgccccggatgtagtaagagctatatgccctgggaattggaggctcaatcatctggtgtgattccaaaaggtggtgttctatttactcagagcactgacacggtgaatcgtgagtcatttaagctctacggtcatgccgttgtgccttttggttctgctgtgtattggagcccctacccaggtatgtggcttccagttatttggtcttctgttaagtcatatgctgatttgacttacacaggcgttgttggttgtaaggcaattgttcaggagacagatgctatttgccggtccctatatatggactacgttcagcacaagtgtggcaatctcgagcagagagctattcttgggttggatgatgtctaccatagacaattgcttgtaaatagaggtgactatagtctcctccttgaaaatgtagatctttttgttaagcggcgcgctgaatttgcttgtaaattcgccacctgtggagatggtcttgtacctctgctactagatggtttggtgccccgcagttattatttgattaagagtggccaagccttcacctcgatgatggttaattttagccatgaggtgactgacatgtgtatggacatggcattattgttcatgcatgatgttaaagtggccactaagtatgttaagaaggttactggcaaactagccgtgcgctttaaggcgttaggtgtagccgttgtcaggaaaattactgaatggtttgatcttgccgtggacactgctgccagtgctgctggatggctttgctaccagctggtaaatggcttatttgcagtggctaatggtggcataaccttcttaagcgatgttcctgagctggtcaagaattttgttgacaagttcaaggtattcttcaaggttttgatcgactctatgtcggtttctgtcctttctggacttactgttgtcaagactgcctctaatagggtttgtcttgctggctgtaaggtttatgaagttgtgcagaagcgtttgtctgcatatgttatgcctgtgggttgcaacgaggccacttgtttagtgggtgagattgaacctgcagttgttgaagatgatgttgttgatgtggttaaagccccattaacatatcaaggctgttgtaagccacctacttcttttgagaagatttgtgttgtggataaattgtatatggccaagtgtggtgatcaattttaccctgtggttgttgataatgacactattggcgtgttagatcagtgttggaggtttccctgcgcaggcaagaaagtcgagtttaacgacaagcctaaagtcaaggagataccctccacgcgaaagattaagatcaactttgcgttggatgcgacttttgatagtgtcctttcgaaggcgtgttcagagtttgaagttgataaagacgttacattggatgagctgcttgatgttgtgcttgatgcagttgagagtacgctcagcccttgtaaggagcatgatgtgattggcacaaaagtttgtgctttacttaataggttggcagaagattatgtctacctctttgatgagggaggcgaggaagtgattgccccaaagatgtattgttccttttctgctccagatgatgaagactgcgtcgcagcggatgttgtggatgcagatgaaaaccaaggtgacgatgctgacgattctgcagcccttgtcaccgatacccaagaagaggacggtgttgccaaggggcaggttggtgtggctgagtcggatgcccgcctcgatcaagttgaggcatttgatattgaaaaggttgaggatcccatcttgaatgagctctcggctgaacttaatgcgccagcagacaagacctatgaggatgttttggcatttgatgccatttattcagaggcattgtctgcattctatgctgtgccaggtgatgaaacgcactttaaggtgtgtggattctattcgccagctatagagcgtactaattgttggctgcgttctactttgatagtaatgcagagcttacctttagaatttaaagatttggagatgcagaagctctggttgtcgtacaaatccagttataataaggaatttgtcgacaaactagttaagagcgtgcccaagtctatcattcttccacaaggtggctatgtggcagattttgcctacttctttttaagccagtgtagctttaaagcttatgctaactggcgctgtttaaagtgtgacatggacttaaagcttcaaggcttggatgccatgttcttttatggagatgtagtatcccatgtgtgtaagtgtggtactggcatgaccttgttgtctgcagatataccttacactttgcatttcggattgcgagatgataaattttgcgccttttacacgccaagaaaagtctttagggctgcttgtgtggtagatgttaatgattgtcattccatggctgttgtggatggcaagcaaattgatggtaaagttgttaccaaatttaatggtgacaaatatgattttatggtgggtcatgggatggcatttagtatgtcagcctttgagattgcccagttatacggttcatgtataacaccaaatgtttgttttgttaaaggagatgttataaaggttttgcgcagagtgggtgctgaagtcatcgttaaccctgctaatgggcgtatggctcatggtgcgggtgttgcaggtgctatagctaaagctgcgggcaaatcttttattaaggagactgctgatatggtaaagaatcagggcgtttgccaggttggtgagtgctatgaatctaccggcggcaatttatgtaagacggtgcttaacattgtaggaccagatgcccgagggcatggcaagcaatgttactcatttttagagcgtgcttatcagcatattaacaagtgtgacgatgttgttaccactttaatatcagctggtatatttagtgtgcctactgatgtttctctgacttatttaattggtgttgtgactaagaatgttattcttgtcagcaacaacaaagatgattttgatgttatagagaagtgtcaagtgacttccattgctggcactaaagcgctctcacttcaattggctaaaaatttgtgccgagatgtaaagtttgagacaaatgcatgtgattcgctttttagtgactcctgcttcgtctcaagctatgatgtgttgcaggaggttgaattgctgcgacatgacatacagttggatgatgatgcccgtgtctttgtgcaggcccatatggacaacctgcccgctgactggcgtctcgttaataagtttgatagtgttgatggtgttagaaccgttaaatattttgagtgtccgggtgagatttttgtatctagccagggcaagaagtttggttatgttcagaatggttcatttaaagtggcaagtgttagccaaataagggctttacttgctaataaggtggatgtcttgtgcaccgttgatggtgttaacttccgctcgtgctgtgttgcagagggtgaagtttttggcaagacattaggttcagtcttttgtgatggcataaatgtcaccaaggttaggtgtagtgccattcacaagggtaaggtcttctttcagtatagtggtctgtctgcggcagatctcgttgctgttaaggatgcctttggctttgatgaaccacagctgctgaagtactacaatatgctaggcatgtgtaagtggccagtagttgtttgtggcaattattttgcttttaagcagtcaaataataattgctatataaatgtggcatgtttaatgctgcaacatttgagtttaaagtttcataagtggcaatggcaggaggcctggaatgagttccgctctggtaagccactaaggtttgtgtccttggtcttggcaaagggcagctttaaatttaatgaaccttctgattcaactgattttatgcgtgtggtgctgcgcgaagctgatttgagtggtgccacatgcgattttgaatttgtttgtaaatgtggtgtaaagcaagagcagcgcaaaggtgttgacgctgttatgcattttggtacgttggataaaggtgatcttgccaagggttacactatcgcatgcacgtgcggtaataaacttgtgcattgcacccaacttaacgtaccatttttaatttgctccaacaagcctgagggtaagaaattgcctgatgatgttgttgcggctaatatttttactggtggtagtttgggacactacactcatgtgaaatgcaaacccaagtaccagctttatgatgcttgtaatgttagtaaggtctctgaggctaagggtaattttaccgattgcctctaccttaaaaatttaaaacaaactttttcgtccaagttgacgactttttatttagatgatgtaaagtgcgtggagtataatccggatttatcgcagtattactgtgagtctggaaaatattatacaaagcccatcattaaggcccagtttagaacatttgagaaggtagagggtgtctataccaattttaaattggtggggcacagcattgccgaaaaattcaatgctaagctgggatttgattgtaattctccctttacggagtataaaattacagagtggccgacagctactggagatgtggtgttggctagtgatgatttgtatgtgagccgttattcaggtggatgtgttacttttggtaagccggttatctggttgggccacgaggaagcatctctgaaatcgctcacatattttaatagacctagtgtcgtttgtgaaaataaatttaatgtgttgcctgttgatgtcagtgaacccacggataaggggcctgtgccggctgcagtccttgttaccggtgctctgagtggtgctgccactgcgcccggtactgccaaggagcaaaaggtgtgcgcttctgatagtgtggtggatcaggttgtctcggggttcttatcagacctgtctggtgcaaccgtggatgtcaaagaggttaaattgaatggtgttaaaaagcctattaaggtggaagatagtgtggttgttaatgaccccactagcgaaaccaaagttgttaaaagtttgtctattgtcgatgtgtatgatatgttcctgacagggtgtagatatgtggtctggatggctaatgagttgtcccggctagtaaattcacctactgttagggagtatgtgaagtggggtatgactaagattgtaatacccgctaaattggtgttgttaagagatgagaagcaagaatttgtagcgccaaaagtagtcaaggcgaaagttattgcctgctatagtgctgtgaagtggttcttcctctattgttttagttggataaagtttaatactgataataaggttatatacaccacagaagtagcttcaaagcttacttttaatctgtgctgtttggcgtttaagaatgccttacagacttttaattggaacgttgtgtctaggggcttcttcctagtggcaacggtctttttattatggtttaactttttgtatgccaatgttattttgagtgatttctatttgcctaatattggtttctttcctacatttgtgggtcagattgtcgcttgggttaagaccacatttggtatttttaccctctgtgatctttatcaggtgtcagatgttggctatagaagttctttttgtaatggaagtatggtctgcgaactatgcttttcaggttttgacatgttggataactatgatgctataaatgttgttcagcatgttgtggataggcgagtgtcttttgactatattagcctatttaagttagtggtcgagcttgttatcggctactctttgtataccgtgtgtttctatccactgtttggccttattggcatgcagttgctgaccacatggttaccagaattctttatgctggaaactatgcattggagcgcgcgcttctttgtgtttgttgctaatatgcttccagcttttacgttactgcggttttatatcgtggtaacagctatgtataagatcttttgtctttgtagacatgttatgtatggatgtagtaaaccaggttgtttgttttgctataagagaaaccgtagtgtccgtgttaagtgtagcactgttgttggtggtacgctacgctattacgatgtaatggctaatggcggcactggtttctgtgcaaagcatcagtggaactgtcttaattgcagcgcttttggacctggcaacacattcataactcatgaagcagcggcggatctctctaaagaattgaagcgccctgttaatccaacagattctgcttactatttggtcacagaggttaagcaggtaggttgttcaatgcgtctgttctacgagagagatggacagcgcgtttatgatgatgttagtgctagtttgtttgtggatatgaatggtctgctgcattctaaggttaaaggtgtgccagaaacacatgttgtagttgttgagaacgaagctgataaggcaggttttcttaatgctgctgttttctacgcacaatccctttatagaccgatgttgctggtagagaagaaattaataactaccgccaacacgggcttgtctgtgagtcagactatgtttgacctttatgtagactcactgctgggcgtcttggacgttgatcgcaagagtctaacaagttttgtgaatgctgcgcacaattccttaaaggagggtgtgcagcttgaacaagttatggatacctttattggttgcgctcgacgtaagtgtgctatagattcagatgttgagaccaagtctattaccaagtccatcatgtcggcagtaaatgctggtgttgattttacggatgagagttgtaacaacttggtacctacatatgtgaaaagcgacactatcgtcgcagccgatttgggtgttcttattcagaataatgctaagcatgtacaggctaatgttgctaaagctgctaatgtggcttgcatctggtctgtggatgcttttaatcagctatctgctgatctgcagcataggctgagaaaggcatgttcaaaaactggcttgaagattaagcttacttataataagcaggaggcaaatgtccctattttaactacaccgttctctcttaaagggggcgctgtgtttagtaaagttttgcaatggttgtttgttgttaatttgatttgtttcattgtactgtgggctcttatgccgacatatgcagtgcacaaatcagatatgcagttgcctttatatgccagttttaaagttatagataatggtgtgctaagggatgtgaccgttacggatgcatgctttgcaaacaaatttattcaatttgatcaatggtatgagtctacgtttggtcttgtctattaccgtaactctagggcgtgtcctgttgtggttgctgtcatagaccaagatattggctataccttatttaatgttcctactaaagtcttaagatatggatttcatgtgttgcattttataacccatgcatttgctactgatagcgtgcagtgttatacgccacatatgcaaatcccctatgataatttctatgctagtgggtgtgtcttgtcttccctctgtactatgctagcgcatgcagatggcacaccgcatccttattgctatacagagggcattatgcataatgcatctctgtatgactctttggctcctcatgttcgttataacctagctaattcaaatggttatatacgctttcctgaagtggttagtgaaggcattgtgcgtattgtgcgcactcgctccatgacctactgcagggttggcttatgtgaggatgctgaggagggtgtttgttttaactttaatagttcttgggtattgaataacccgtattatagggctatgcctggaactttttgtggtaggaatgcttttgatttaatacaccaagttttaggaggtttagtgcggcccattgacttctttgccctaacggcgagttcagtggctggtgctatcctagcaattattgttgttttagctttttattatttaataaagcttaaacgtgcctttggtgactatactagcgttgtggtcatcaatgtcattgtgtggtgtataaatttcctgatgctatttgtgtttcaggtttatcccactttatcttgtttatatgcttgtttttatttttacacgacgctttatttcccctcggagataagtgttgttatgcatttgcaatggctagtcatgtatggtgctattatgcccttgtggttttgcattatatacgtggcagttgttgtttcaaaccatgcattgtggctgttctcttactgccgtaagcttggtacagaagttcgtagtgatggtacatttgaggagatgtcccttactacttttatgattactaaagaatcctattgtaagttgaaaaattctgtttctgatgttgcttttaacaggtacttgagtctctataacaagtatcggtattttagtggtaaaatggataccgcggcctatagagaggctgcttgttctcaactagcaaaggcgatggaaacatttaaccataataatggtaatgatgttctctatcagccacctacggcctctgttactacatcatttttacagtccggtatagtgaagatggtgtttcccacctctaaggtggaaccttgtgttgttagtgtcacctatggtaacatgacacttaatgggttgtggttggacgataaagtttattgtccaagacatgtcatctgctcctcagctgacatgacagaccctgattattctaatttgctttgtagagtgatatcaagtgatttttgtgttatgtctggtcgtatgagccttactgttatgtcttatcaaatgcagggcagtctacttgttttgactgttacactgcaaaatcctaacacacctaagtactccttcggtgttgttaagcctggtgagacgtttactgttttggctgcatacaacggcaaatctcaaggagccttccatgttactatgcgtagtagctataccataaagggctccttcttgtgtggatcctgcggttctgtaggatatgttttaacgggcgatagtgtacgatttgtctacatgcatcagctagagttgagtactggttgtcacaccggtactgactttagtgggaacttttatggtccctatagagatgctcaagtcgtacaattgcctgttcaagattatacgcagactgttaatgttgtagcttggctttacgctgctattcttaatagatgcaattggtttgtgcaaagtgatagttgttccctggaagagtttaatgtttgggctatgaccaatggttttagttcaattaaagccgaccttgttctagatgctcttgcgtctatgacaggtgttacagttgaacaagtattggctgctattaaccggctgtatcctggcttccagggtaaacaaattttaggtagttgtgtgcttgaggatgagctgacgccaagcgatgtttatcaacaactagctggtgttaagttacagtcaaagcgcacaagagttgttaaaggtacatgttgctggatattggcttcaacattattgttttgtagcattatctcagcatttgtaaaatggactatgtttatgtatgttactacccatatgttgggtgtgacattgtgtgcactttgctttgtgagctttgctatgctgttggttaagcataagcatttgtatttaactatgtttattatgccggttttgtgcacattgttttacacgaactatttagttgtgtataaacagagttttagaggcctagcttatgcatggctttcacactttgtccctgctgtagattatacatacatggatgaagttttatatggtgtcgtgttgctagtagctatggtttttgttaccatgcgcagcataaatcacgatgtcttctctgttatgttcttggttggtagacttgtcagcttggtgtctatgtggtactttggggccaatttagaggaggaggtgctattgttcctcacatcactctttggcacgtatacatggactactatgctgtcattggctactgctaaggtcattgctaaatggttggctgtgaatgtcttgtacttcacagacgtaccgcaagttaaattagttcttttgagctatttgtgtattggttatgtgtgttgttgttattggggcgtcttgtcactccttaatagcatttttaggatgccgttgggtgtctataattataaaatctccgtgcaggagttacgctatatgaatgctaatggcttgcgcccgcccagaaatagttttgaagccctagtgcttaattttaaattgttgggaattggtggtgtgccagtcattgaagtatctcaaattcaatcaagattgactgatgttaaatgtgttaatgttgtgttgcttaactgcctccagcacttgcatattgcatctagttctaagttgtggcagtattgcagtactttgcataatgaaatattagctacatctgatttgagcgtggcctttgataagttggctcagctcctagtagtcttatttgctaatccagcagcagtggatagcaagtgtcttgcaagtattgaagaggtgagcgatgattacgttcgcgacagtactgtcttgcaagccctacagagtgaatttgttaatatggctagcttcgttgagtatgaacttgctaagaagaatttagatgaggccaaggctagcggctctgccaatcaacagcagattaagcaactagagaaggcttgtaatattgctaagtcagcatatgagcgcgacagagctgttgctcgcaagcttgaacgtatggctgatttggctcttacaaatatgtataaagaagctagaattaatgataagaagagtaaggtagtttctgcattgcaaaccatgctttttagtatgattcgtaagctggataaccaagctcttaattctattttagataatgcagttaagggttgtgtacctttgaatgcaataccatcattgacttcaaacactctgactataatagtgccagataagcaggtttttgatcaagttgtggataatgtgtatgtcacctatgctgggaatgtatggcatatacaatctattcaggatgctgatggcgctgttaaacaattgaatgagatagatgttaatataacctggcccctagtcattgctgcaaataggcataatgaagtgtctagtgttgttttgcagaacaatgagttgatgcctcagaagttgagaacgcaggttgtcaatagtggctcagatatgaattgtaatactcctacccagtgttattataatacgactggcatgggtaagattgtgtatgctatacttagtgactgtgatggtcttaagtacactaagatagtaaaagaagatggaaattgtgttgttttggagttggatcctccctgtaaattttcagttcaggatgtgaaggggcttaaaattaagtacctttactttgtgaaggggtgtaatacactggccagaggctgggttgttggcaccttatcctcgacagtgaggttgcaggcaggtacggcaactgagtatgcctccaactctgcaatactgtcgttgtgtgcgttttctgtagatcctaagaaaacgtacctggactatatacaacagggtggagctcccgttactaattgtgttaagatgttatgtgaccatgctggcactggtatggccattactattaagccggaggcaaccactaatcaggattcttatggtggtgcttccgtttgtatatattgccgctcgcgtgttgaacatccagatgttgatggattgtgcaaattacgcggcaagtttgtccaagtgcccttaggtataaaggatcctgtgtcatatgttttgacacatgatgtttgtcaggtctgtggcttttggcgagatggtagctgttcctgtgtaggcacaggctcccagtttcagtcaaaagacacgaactttttaaacgggttcggggtacaagtgtaaatgcccgtcttgtaccctgtgccagtggcttggacactgatgttcaattaagggcatttgatatttgtaatgctaatcgagctggcattggtttgtattataaagtgaattgttgccgttttcagcgcgcagatgaagatggcaacacgttggataagttctttgttattaaaagaaccaatttagaagtgtataataaggagaaagaatgctatgagttgacaaaagaatgtggtgttgtggctgaacacgaattcttcacattcgatgttgagggaagtcgtgtaccacacattgtacgcaaagatctttcaaagtatactatgttagacctttgctatgcattgcggcatttcgatcgcaatgattgttcaactctcaaggaaattctccttacttatgctgagtgtgatgagtcctactttcagaagaaggactggtatgattttgttgagaattctgatataattaatgtgtacaaaaagcttggacctatttttaatagggccttgcttaacactgctaagtttgcggacacattagtggaggcaggcctagtaggtgttttaacacttgataatcaagatttgtatggtcaatggtatgactttggagattttgtcaagacagtgcctggatgtggtgttgccgtggcagattcctattattcttatatgatgccaatgctgactatgtgtcatgcgttggatagtgagttgtttattaatggtacttatagggagtttgaccttgttcagtatgattttactgatttcaagttagagctctttaataagtattttaagtattggagtatgacctatcacccgaacacctgtgagtgcgaggatgacaggtgcattattcattgcgccaattttaatatactatttagtatggttttacctaagacctgttttgggcctcttgttaggcaaatctttgtagatggtgtgcctttcgttgtctcgattggctaccattataaagaattaggtgttgttatgaatatggatgtggatacacatcgttaccgcttgtctcttaaagacttgcttttgtatgcagcagatcctgcccttcatgtggcgtctgctagtgcactgcttgatttgcgcacatgctgttttagcgtagcagctattacaagtggcgtaaaatttcaaacagtcaaacctggaaattttaatcaggatttttatgagtttattttgagtaaaggcctgcttaaagaagggagctccgttgatttgaagcacttcttctttacgcaggatggtaatgctgctattactgattataattattacaagtataatctccccactatggtggatattaagcagttgttgtttgttctagaagttgttaataagtattttgagatctatgatggtgggtgtatacccgcaacacaggtcattgttaataattatgataagagcgctggctatccatttaataaatttggaaaggccagactctattatgaggcattatcatttgaggaacaggatgaagtttatgcgtacactaagcgcaacgtcctgccaacattaactcaaatgaatcttaaatatgctattagtgctaagaatagggctcgcactgttgctggtgtttccattcttagtactatgactggcagaatgtttcatcaaaagtgtttaaagagtatagcagctactcgtggtgttcctgtagttataggcaccacgaaattttatggcggttgggacgatatgttacgccgccttattaaagatgttgatagtcctgtacttatgggttgggactatcctaaatgtgatcgtgctatgccaaacatactgcgcattattagtagtttggtgttagcccgcaaacatgattcgtgctgttcgcatacagatagattctatcgtcttgcgaatgagtgcgcccaagttttgagtgaaattgttatgtgtggtggttgttattatgttaaaccaggtggcactagcagtggggatgcaaccactgcctttgctaattctgtttttaacatttgtcaagctgtctccgccaatgtgtgctcgcttatggcatgcaatggacacaaaattgaagatttgagtatacgcgagttacaaaagcgcctatactctaatgtgtatcgtgcggatcatgttgaccccgcatttgttaatgagtattatgagtttttaaataagcattttagtatgatgattttgagtgatgatggtgttgtgtgttataattcagagtttgcgtccaagggttatattgctaatataagtgcctttcaacaggtattatattatcaaaataatgtgtttatgtctgaggctaaatgttgggtcgaaacagacatcgaaaagggaccacatgaattttgttctcaacacacaatgctagtaaagatggatggtgatgaagtctaccttccatatcctgatccttcgagaatcttaggagcaggctgttttgttgatgatttattaaagactgatagcgttctcttgatagagcgattcgtaagtcttgcaattgatgcttatcctttagtataccatgagaacccagagtatcaaaatgtgttccgggtatatttagaatatataaagaagctgtacaacgatctcggtaatcagatcttggacagctacagtgttattttaagtacttgtgatggtcaaaagtttactgatgagaccttttacaagaacatgtatttaagaagtgcagtgatgcaaagcgtcggtgcctgcgtcgtctgtagctcccaaacatcattacgctgtggcagttgcatacgcaagccattgctgtgttgcaagtgcgcttatgatcatgttatgtctactgatcataaatatgtcctgagtgtgtcaccttatgtgtgtaattcgccgggatgtgatgtaaatgatgttaccaaattgtatttaggtggtatgtcatattattgtgaggaccataagccacagtattcattcaagttagtgatgaatggtatggtttttggtctatataaacaatcttgtactggttcgccctacatagaagattttaataaaatagctagctgtaaatggacagaagtcgatgattatgtgctagctaatgaatgtaccgagcgtctcaaattgtttgccgcagaaacgcaaaaggccactgaagagtcctttaagcaatgttatgcgtcagcaacgatccgtgagatcgtgagcgatcgggagttaattttatcttgggaaattggtaaagtgaggccaccacttaataaaaattatgtttttactggctaccattttacttctaatggtaagacagttttaggtgaatatgtttttgataagagtgagttgactaatggtgtgtattatcgcgccacaaccacttataagttgtctgttggtgatgtttttattttaacatcacatgcagtgtctagtttaagtgctcctacattagtaccgcaggagaattatactagcattcgctttgctagtgtttatagtgtgcctgagacgtttcagaataatgtgccaaattatcagcacattggaatgaagcgttattgtactgtacagggacctcctggtactggaaagtcccatctagccattgggctagctgtttattattgtacagcgcgtgtggtgtataccgctgctagccatgctgcagttgacgcgttgtgtgaaaaggcatataaatttttaaatattaatgactgcacgcgtattgttcctgcaaaggtgcgtgtagattgttatgataaatttaaggtcaatgacaccactcgtaagtatgtgtttactacaataaatgcattacccgagttggtgactgacattattgttgttgatgaagttagtatgcttaccaattatgagttgtctgttattaacagtcgtgttagggctaagcattatgtttatattggagatcctgctcagttgcccgcaccccgtgtgctactgaataagggcactctagaacctagatattttaattctgttaccaagctaatgtgttgcttgggtccagatattttcttgggtacctgttatagatgccctaaggaaattgtggatacagtgtcagccttggtttatcataataagctgaaggctaaaaatgataatagctccatgtgttttaaggtctattataaaggccagactacacatgagagttctagtgctgtcaatatgcagcaaatatatttaattagtaagtttttaaaggcaaaccccagttggagtaacgccgtatttattagtccttataatagtcagaactatgttgctaagagagtcttgggtttacaaacccagacagtagattcagcgcagggttctgaatatgattttgttatttattcacagactgcggaaacagcgcattctgtcaatgtaaatagattcaatgttgctattacacgtgctaagaagggtatcctctgtgtcatgagtagtatgcaattatttgagtctcttaattttagcacactgactctggataagatcaataatccacgattacagtgtactacaaatttgtttaaggattgtagcagaagctatgcaggttatcacccagctcatgcgccttcctttttggcagttgatgataaatataaggtaggtggcgatttagccgtttgccttaatgttgctgattctgctgtcacttattcgcggcttatatcactcatgggattcaagcttgacttgacccttgatggttattgtaagctgtttataactagagatgaagctatcagacgtgttagagcctgggtaggctttgatgcagaaggtgcccatgcgacgcgtgatagcattgggacaaatttcccattacaattaggcttttcgactggaattgattttgttgtcgaggccactggaatgtttgccgagagagatggctacgtctttaaaaaggcagtggcacgagcacctcccggcgaacaatttaaacacctcgtcccacttatgtctagaggacagaaatgggacgtggttcgaattcgaatagtacaaatgctgtcagaccacttagtggatttggcagacagtgttgtacttgtgacgtgggctgccagcttcgagctcacatgtttgcgatatttcgctaaagttggaaaagaagttgtgtgtagtgtctgcaacaagcgtgcgacatgttttaattctaggactgggtactatggatgctggcgacatagttattcctgtgattacctgtataacccactaatagttgatattcaacagtggggatatactgggtctttaactagcaatcatgacctcatttgcagcgtgcataagggtgctcatgtcgcatcttctgatgctatcatgacccgatgcttagctgtccatgattgcttttgcaaatctgttaattggagtttagaataccccattatctcaaatgaggttagtgttaatacctcctgcaggttattgcagcgtgtaatgtttagggctgcgatgctatgcaataggtatgatgtgtgttatgacattggcaaccctaaaggtcttgcctgtgtcaaaggctatgattttaagttttatgatgcctctcctgttgttaagtctgttaaacagtttgtttataagtatgaggcacataaagatcaatttttagatggtttatgtatgttttggaactgcaatgtggataagtatcccgcgaatgcagttgtatgtaggtttgacacgagagtgttaaacaaattaaatctccctggctgtaatggtggtagtctgtatgttaataaacatgcattccacaccagtccctttacgcgggcagccttcgagaatttgaagcctatgcctttcttttattactcagatacgccttgtgtgtatatggagggcatggagtctaagcaggtcgattatgtcccattgagaagcgccacttgcattacaagatgcaatttaggtggcgctgtttgtttaaaacatgctgaggattatcgtgagtaccttgagtcttacaatacggcaaccacagcgggttttaccttttgggtctataagacttttgatttttacaacctttggaatacttttactaggctccaaagtttagaaaatgtagtgtataatttggtaaatgctggacactttgatggacgggcgggtgaactgccttgtgccgttataggtgagaaagtcattgccaagattcaaaatgaggatgtcgtggtttttaaaaataacacgccattccctactaatgtggctgttgaattatttgctaagcgcagtattcgaccacacccagagcttaagctctttagaaatttgaatattgacgtgtgctggagtcacgtcctttgggattatgctaaggatagtgtgttttgcagttcgacgtacaaggtctgcaaatacacagatttacagtgcattgaaagcttgaatgtactttttgatggtcgtgataatggtgctcttgaagcttttaagaagtgccgggatggcgtctacattaacacgacaaaaattaaaagtctgtcgatgattaaaggcccacagcgtgccgatttgaatggcgtagttgtggagaaagttggagattccgatgtggaattttggtttgctatgcgtagagacggtgacgatgttatcttcagccgtacagggagccttgaaccgagccattaccggagcccacaaggtaatccgggtggtaatcgcgtgggtgatctcagcggtaatgaagctctagcacgtggcactatctttactcaaagcagatttttgtcctctttcgcacctcgatcagagatggagaaagactttatggatttagatgaagacgtgttcattgcaaaatatagtttacaggactacgcgtttgaacatgttgtttatggtagtttcaaccagaagatcattggaggtttgcatttgcttattggcttagcccgtaggcagcaaaaatccaatctggttattcaagagttcgtcccgtacgactctagcatccactcgtactttatcactgacgagaacagtggtagcagtaagagtgtgtgcactgttattgatttgttgttagatgattttgtggacattgtaaagtccctgaatctaaattgtgtgagtaaggttgttaatgtgaatgttgattttaaagatttccagtttatgttgtggtgcaatgaggagaaggtcatgactttctatcctcgtttgcaggctgccgctgattggaaacctggttatgttatgcctgtattatacaagtacttggaatcgccgctggaaagagttaatctctggaattatggcaagccgattactttacctacaggatgtttgatgaatgttgctaagtatactcaattatgccaatatttgaatactacaacattagcagtcccggctaatatgcgtgttttacacctcggagccggttctgataaggatgttgcccctggatctgcagttcttaggcagtggttaccagcaggcagcattcttgtagataatgatataaatccatttgtgagtgacagtgttgcctcatattatggaaattgtataaccttacccatagcgtgtcagtgggatttgataatttctgatatgtacgaccctcttactaagaacattggggagtacaacgtgagtaaagatggattctttacttacctttgtcatttaattcgtgacaagttggctctgggtggcagtgtcgccataaaaattacagagttttcttggaacgctgagttatatagtttaatggggaagtttgcgttttggacaatcttttgcaccaacgtaaacgcctcttcaagtgaaggatttttgattggcataaattggttaaataggacccgtaccgagattgacggtaaaaccatgcatgccaattatttgttttggagaaatagtacaatgtggaatggaggggcttacagtctttttgatatgagtaagttccctttgaaggtggctggtacggctgttgtaagcctaaagccagaccaaataaatgatttagtcctctccttgattgagaagggcaagttattagtgcgtgatacacgcaaggaagtatttgttggcgatagccttgtaaatgttaaataaatctatacttgtcatggctgcgatgcaggcctttgctgacaagcctaatcattttataaacttcccattggcccaatttagtggcgttatgggtaagtatttaaagcttcagtcgcaacttgtggaaatgggtttagactgtaaattacagaaagcaccacatgttagtattaccatgctcgatattagagcagatcaatacaaacacgtggaatttgcaatacaagaagtaatagatgatatggcggcatatgagggagatattgtctttgacaaccctcacatgcttggcagatgtcttgttcttgatgttaaaggatttgaagagttgcatgaagatatagttgaaattctccggaaaaggggttgcatagcagatcaatccagacaatggattcctcactgtactgtggcccaatttgaggaagaaaaagaaataaatgagctgcaattctattataaattacccttctacctcaagcataacaacatattaacggatgctaggcttgagcttgtgaagataggttcttccaaaacagatgggttctattgtagtgagctgagcatttggtgtggtgagagactttgttacaagcctccaacacccaaatttagtgatatatttggctattgctgcattgataaaatacgtgttgacttagaaattggtgacctacccgaggatgatgaagaagcgtgggccgagctaagttaccactatcaaagaaacacctacttcttccgctacgtacatgataatagcatttattttcgtaccgtatgcagaatgaagggttgtatgtgttgatttggttttacactagtagtgtaataaacttattattttattgaaacaggcagtatgtgcatggctatggctccccgcactctgcttttgctgattggatgtcagctggtgtttgggttcaatgaacctttaaacaccgtttcacattcaaatgatgattggtttttgtttggtgacagtaggtctgactgcaaccatataagtagcctttctcagcagaattataagtatatggatattaacccagaattgtgtaagtcggggaagatttcttctaaggcgggtaattccctctttagaagttttcatttcaccgatttctacaattatagtggcgaaggttcataaatcatattttatgaaggagttaattttaccccatatgttgggtttaagtgtatgaataatggggataataataggtggatgggtaataaagctcgattttatacccaattgtatcagaagatggctcattatcgtagcctatctataattaatgttacttacacatataatggtaatgctactcccgttgctatgtgtaagcacactgctaatggtgtcacattgaccctaaccctaccttcattggtaaggagacaagtgcacctaattattattatgagagcgaggcaaactttacgttgcatggatgcgatgagtttattgtcccgctctgcgtctttaatggccagtatttatctagtaaactgtattatgatgatagtcagtattattataatattgatacaggcattttatatgggtttaattccaccttgaatattaccactgggttggacttaacctgtatctatctttcattagctcctggtaattataaggccattttaaatgaattattgttaactataccctctaaggctatttgcctgcgtaagcctaaggtgtttacgcttgtgcaagtagttgattctagatggcatagtaataggcaatctgacaatatgactgctattgcgtgtcagctgccatattgttatttccgtaatgccagtaatgattacaatggcatttatgattctcaccatggcgatgctggatttactagcatcttgtctggtttgttatataatgtttcctgtattgcccagcagggtgcatttctttataataatgttagcgcctcttggccagtttttggctacggccattgtccaacggcagctaacattggatatatggcacctgtttgtatgtatgatcctttaccggtcatattacttggtgtcttactgggtatagctgtgttaattattatttttcttattttgtattttatgacggatagcagtgttaggttgcatgaggcctaagtgtttaaatctaatctaaacatgctattcgtgtttttaaccttgttgccctcttctctagggtatattggtgattttagatgtatccaacttgtaaataccgacacctctaatgccagcgctccaagcgttagtacagaggtagttgatgtttccaaagggattggtacttattatgttttagatcgagtctatttaaatgccacactattgcttactggttattaccctgtagatgggtccatgtatagaaacatggctctaacgggaattaataccataagccttaattggtacaaaccaccctttttatcagagtttaatgatggcatatttgctaaggtaaagaaccttaaagcatctttgcccaaagattctatttcatatttccctactataattataggtagtaattttgtcaccacttcctatactgtagtattggaaccgtataatggtataattatggcatccatttgccagtataccatttgtcaactaccgtacacggattgcaaaccgaatacgggcggtaataagttaattggcttttggcacacagagctaaaatcccctgtgtgcattttaaagcgtaattttacgtttaatgttaatgccgaatggctttattttcatttttaccagcagggtggtactttttatgcgtattatgcggatgtttcttctgctactacgtttttgtttagtatgtatattggtgatgtgttaacacaatattttgtgttgccttatatgtgtactctcactacaacaggtgtcttttcaccgcagtattgggttacacctcttgtcaagcgccaatatttatttaattttaatcaaaagggtattattactagtgctgttgattgtgctagtagttataccagcgaaataaagtgtaagacccaaagtatgaatcccaatacgggagtttatgatttatccggttacaccgtccaacctgtaggattagtgtaccggcgtgttagaaatttgcctgattgtaaaattgaggaatggctaactgctaagtctgtaccttctcctctcaattgggagcgcaaaacatttcaaaattgtaacttcgacctgagcagtctattaagatttgttcaggctgagtcactctcatgtagtaatatagatgcttccaaggtttatggtatgtgctttggtagtatatctatagacaagtttgcgatacccaatagacgccgagttgatttgcagctaggcaactctgggtttttgcaatcctttaattacaaaatagatacaagagctacttcgtgtcagctctattatagtcttgcaaaaaataatgtcactgtcaataaccataacccgtcctcttggaacaggcgttatgggttcaatgatgtggctacatttggaactggtaaacatgacgttgcgtatgctgaggcttgttttaccgtgggagcatcatattgcccttgcgcgaaccccagcatagtgtcgccatgtaccactggaaaacctaactttgccaattgccctacaggcacctcgaatcgtgagtgcactgttatgccattggctaataatcaatttaagtgtgattgcacttgtaaccctagtcctctaaccacctatgatcttagatgtctccaagcaagaagcatgcttggcgtaggtgatcattgtgaaggtctaggagttttagaagataaatgtggtggcagcaacacctgcaattgttctgctcatgcctttgttggctgggctaaggatagttgcttggctaatggccgctgtcacatttttagtaatttgatgttaaatggcattaatagtggtactacatgttccatggatttgcaattgcctaatactgaagtggtcactggcgtctgcgtcaaatatgacctctacggtataacaggccaaggtatttttaaggaggttaaggctgactattatcatagttggcaaaacctcttatatgatgttaatggcaacttaatcggatttcgcgattttgttgctaataagagttatactattcgaagttgctatagtgggcgggtctcggctgcatatcatcaagatgcaccagaaccagcgctactatatcgcaatttaaaatgtgactatgtctttaacaacaacatatcccgtgaggagacaccacttaactatttcgatagttatcttggttgtgttgttaatgctgacaactcaactgaagaagctgttgacgcgtgtgatttgcgtatgggtagtgggctttgtgtcaactattcaacgtctcaccgcgctcgcagctctgtcagcacgggttataaattaactacttttgaaccatttacagtccgcattgtcaatgatagtgttgagtctgttgatgggttatatgagctgcaaataccaaccaactttactatagctagccatcaggagttcgttcaaacgaggtctccaaaggttactatagactgtgctgcatttgtctgtggtggccacacagcatgccgtcagcagttggttgagtacggctcattctgtgataatattaatgccattcttggcgaggtaaataacctcatagatactatgcaacttcaagttgcaagtgctttaatccaaggtgtcacgttaagctcacgcttatcggatggcattggtggtcaaatagatgatattaattttagtcctctgcttggttgtttaggttctgactgtggcgaagttaccatggcagctcaaaccggacgatctgctatagaggatgtattatttgacaaagtcaaactctctgatgttggctttgtcgaagcatataacaattgcactggaggccaagaagttagagacctactttgtgtgcaatcttttaatggcatcaaagtgctaccgcctgtgttgtctgagaatcaaatttctggttatacagcgggagctactgtatctgctatgttcccatggtctgcagctgcaggtgtgccattttctttaagtgttcaatatagaattaatggtcttggtgtcactatgaatgttcttagtgaaaatcagaaaatgatagcaagtgcatttaacaacgcgataggtgctatacaggaagggtttgctgcaaccaattctgccttagcaaaaatgcagttcgttgtcaatgcaaatgcggaagcactcaataatttattaaaccagctttccaataggtttggtgcaattagtgcttctttacaagaaattctatctcgcctagatgctcttgaagcgcaggctcagatagaccgtcttattaatggcagattaactgcacttaatgcatatgtctctaagcagctgagtgacatgacccttgttaaggtgagtgcagcccaggctatagagaaagttaatgagtgtgttaaaagccaatcatctaggataaatttctgtggcaatggcaatcatatattgtcattagtccagaatgcgccttatggtttatattttattcatttcagctatgtgcctacttcctttacaacggcaaatgtgagtcctgggctatgcatttctggtgatagaggattagcacctaaagctggatattttgttcaagatgatggagagtggaagttcacaggtagtaattattattaccctgaacccattacagataaaaatagtgtcgtgatgagtagttgcgcagcaaactacacaaaggcacctgaagttttcttgaacacttcaatacctaatctacccgactttaaggaggagttagataaatggtttaaaaatcagacgtctattgcgcctgatttatctctcgatttcgagaaattaaacgttaccctcctggacctgactgatgagatgaacaggattcaggatgcaattaagaagttaaatgagagttacatcaacctcaaggacgttggcacatatgaaatgtatgtgaaatggccttggtatgtgtggttgctaattggattagctggtgtagctgtttgtgtgttgttatttttcatatgttgctgcacgggttgtggctcatgttgtttcaagaagtgtggaaattgttgtgatgagtgtggaggacaccaggacagtattgtgatacataatatttcctctcatgaggattgactatcacagcctctcctggaaagacagaaaatctaaacaatttattgcactttccccgctacttggccccgtaagaggcagccatagctatggccgtgtagggtcctaaagctacattggctgctgtctttatcggtccatttattgtagcatgtatgctaggcattggcctagtttattcattgcaattgcaagtttaaatttttcatgttaatgataccatacgtgtgactggcaagccagccactgtgtcttatactataagtacaccagtaacgccgagtgccacgacgctcgacggtactacgtatactttaattagacccataagctcttatacaagagtttaccttggcaaaaccagagggtttgatactggtacatttggcccaaaggtcttggactatgttactaatctaaacctcatcttaattctggtcgtccatacaccttccgtaagcttggtttatgagaccgacagccacatggacatatggcatgtgagtgatgcttggttacgccgaacgcgagactttggtgtcactcgccttgaagatttttgctttcaatttaattattgccaacctcgaattggttattgtagagttcctttaaaggcttggtgtagcaaccagggtaaatttgcagcgcagtttacccttaaaagttgcgaaaaatcaggccaagaaatatttattactagcttcacggcctacgacaaaactgtcaaaaaggccgttagtaagctagtagaagaagctgttgattttatcatctggagagccacgcagctcgaaagatatgtttaatttattccttacagatacagtatggtatgtggggcagattatttttatagtcgcagtgtgtttgatggtcaccataatagtggttgccttccttgcgtctatcaaactttgtattcaactttgcggtttgtgtaatactttgttgctgtctccttctatttgtgtgtataataggagtaagcagctttataagtattataatgaagaagtgagaccgcccccgttagaggtggatgatataataatccaaacattatgagtagtactactcaggccccagagcccgtctatcaatggacggccgacgaggcagttcaattccttaaggaatggaacttctcgttgggcattatactactctttattactatcatactacagttcggttacacgagccgtagcatgtttatttatgttgtgaaaatgataatcttgtggttaatgtggccactgactattgttttgtgtattttcaattgcgtgtatgcgctaaataatgtgtatcttggattttctatagtgtttactatagtgtccattgtaatctggattatgtattttgttaatagcataaggttgtttatcaggactggtagctggtggagcttcaaccccgaaacaaacaaccttatgtgtatagatatgaaaggtaccgtgtatgttagacccattattgaggattaccatacactaacagccactattattcgtggccacctctacatgcaaggtgttaagctaggcaccggtttctctttgtctgacttgcccgcttatgttacagttgctaaggtgtcacacctttgcacttataagcgcgcattcttagacaaggtagacggtgttagcggttttgctgtttatgtgaagtccaaggtcggaaattaccgactgccctcaaacaaaccgagtggcgcggacaccgcattgttgagaatctaatctaaactttaaggatgtcttttgttcctgggcaagaaaatgccggtagcagaagctcctctggaaaccgcgctggtaatggcatcctcaagaagaccacttgggctgaccaaaccgagcgtggaaatagaggcagaaggaaccatcccaagcagactgcaactactcagcccaatgccgggagtgtggttccccattactcttggttttcgggcatcacccagtttcaaaagggaaaggagttccagtttgcacaaggacagggagtgcctattgccagtggaatccccgcttcagagcaaaagggatattggtatagacacaaccgacgttcttttaaaacacctgatggccagcacaagcagctactgcccagatggtatttttactatcttggaacagggccccatgctggcgcagagtatggcgacgatatcgaaggagttgtctgggtcgcaagccaacaggccgacactaagaccactgccgatgttgttgaaagggacccaagcagtcatgaggctattcctactaggtttgcgcccggcacggtattgcctcagggcttttatgtagaaggctcgggaaggtctgcacctgctagtcgatctggttcgcggtcacaatcccgtgggccaaataatcgcgctagaagcagttccaaccagcgccagcctgcctctgctgtaaaacctgacatggccgaagaaattgctgctcttgttttggctaagcttggtaaagatgccggccagcccaagcaggtaactaagcaaagcgccaaagaagtcaggcagaaaattttaactaagcctcgtcaaaagaggactccaaacaagcagtgcccagtgcagcagtgttttgggaagagaggccctaatcagaactttggaggctctgaaatgttaaaacttggaactagtgatccgcagttccccattcttgcagagttggctccaacacctagtgccttcttctttggatctaaattagaattggtcaaaaagaactctggtggtgctgatgaacccaccaaagatgtttatgaattgcagtattcaggtgcaattagatttgatagtactctacccggttttgagactatcatgaaagtgttgactgagaatttgaatgcctaccaggaccaagctggtagtgtagatctagtgagcccaaagcctccaagaagaggtcgtagacaggctcaagaaaagaaagatgaagtagataatgtaagcgttgcaaagctcaaaagcttggtgcagcgaaatgtaagtagagaattaacccccgaggatcgtagcctgctggctcagatcctagacgatggcgttgtgccagatgggttggaagatgactctaatgtgtaaagagaatgaatcctatgtcggcgctcggtggtaacccctcgcgagaaagtcgggataggacactctctatcagaatggatgtcttgctgtcataacagatagagaaggttgtggcagaccctgtatcaattagttgaaagagattgcaaaatagagaatgtgtgagagaagttagcaaggtcctacgtctaaccataagaacggcgataggcgccccctgggaagagctcacatcagggtactattcctgcaatgcactagtaaatgaatgaagttgatcatggccaattggaagaatcacaaaaaaaaaaaaaa

SEQ ID NO: 41 - DNA, 31112 bp, Coronavirus
ataagagtgattggcgtccgtacgtaccctttctactctcaaactcttgttagtttaaatctaatctaaactttataaacggcacttcctgtgtgtccatgcccgtgggcttggtcttgtcatagtgctgacatttgtggttccttggtttttgttctctgccagtgacgtgtccattcggcgccagcagcccacccataggttgcataatggcaaagatgggcaaatacggtctcggcttcaaatgggccccagaatttccatggatgcttccgaacgcatcggagaagttgggtagccctgagaggtcagaggaggatgggttttgcccctctgctgcgcaagaaccaaaaactaaaggaaaaactttgattaatcacgtgagggtggattgtagccggcttccagcattggagtgctgtgttcagtctgccataatccgtgatatttttgttgatgaggatcccttgaatgtggaggcctcaactatgatggcattgcagttcggtagtgctgtcttggtcaagccatccaagcgcttgtctattcaggcatgggctaagttgggtgtgctgcctaaaactccagccatggggttgttcaagcgcttctgcctgtgtaacaccagggagtgcgtttgtgacgcccacgtggcttttcaactttttacggtccagcctgatggtgtatgcctgggcaatggccgttttataggctggtttgtgccagtcacagccataccggcgtatgcgaagcagtggttgcaaccctggtccatccttcttcgtaagggtggtaacaaaggttctgtaacatccggccatttccgccgcgctgttaccatgcctgtgtatgactttaatgtggaggatgcttgtgaggaggttcatcttaacccgaagggtaagtactcccgcaaggcgtatgctcttcttaagggctatcgcggtgttaaatccatcctattcttggaccagtatggttgtgactatactgggcgtctcgccaagggtcttgaagactatggcgattgtactttggaagagatgaaggagttgtttcctgtgtggtgtgactccttggataatgaagttgttgtggcctggcatgttgatcgggatcctcgggctgttatgcgcttgcagactcttgctactgtacgttgcattggttatgtgggccaaccgaccgaggatttggttgatggagatgtggtagtgcgtgagcctgctcatctcctagcagccaatgccatcgtcaaaaggctcccccgcctggtggagactatgctgtatacggactcttccgttacagaattttgttataaaactaagttgtgtgattgtggttttatcacgcagtttggttatgtggattgctgtggtgatgcctgcgattttcgtgggtgggttcctggcaatatgatggatggctttctttgccccggatgtagtaagagctatatgccctgggaattggaggctcaatcatctggtgtgattccaaaaggtggtgttctatttactcagagcactgacacggtgaatcgtgagtcatttaagctctacggtcatgccgttgtgccttttggttctgctgtgtattggagcccctacccaggtatgtggcttccagttatttggtcttctgttaagtcatatgctgatttgacttacacaggcgttgttggttgtaaggcaattgttcaggagacagatgctatttgccggtccctatatatggactacgttcagcacaagtgtggcaatctcgagcagagagctattcttgggttggatgatgtctaccatagacaattgcttgtaaatagaggtgactatagtctcctccttgaaaatgtagatctttttgttaagcggcgcgctgaatttgcttgtaaattcgccacctgtggagatggtcttgtacctctgctactagatggtttggtgccccgcagttattatttgattaagagtggccaagccttcacctcgatgatggttaattttagccatgaggtgactgacatgtgtatggacatggcattattgttcatgcatgatgttaaagtggccactaagtatgttaagaaggttactggcaaactagccgtgcgctttaaggcgttaggtgtagccgttgtcaggaaaattactgaatggtttgatcttgccgtggacactgctgccagtgctgctggatggctttgctaccagctggtaaatggcttatttgcagtggctaatggtggcataaccttcttaagcgatgttcctgagctggtcaagaattttgttgacaagttcaaggtattcttcaaggttttgatcgactctatgtcggtttctgtcctttctggacttactgttgtcaagactgcctctaatagggtttgtcttgctggctgtaaggtttatgaagttgtgcagaagcgtttgtctgcatatgttatgcctgtgggttgcaacgaggccacttgtttagtgggtgagattgaacctgcagttgttgaagatgatgttgttgatgtggttaaagccccattaacatatcaaggctgttgtaagccacctacttcttttgagaagatttgtgttgtggataaattgtatatggccaagtgtggtgatcaattttaccctgtggttgttgataatgacactattggcgtgttagatcagtgttggaggtttccctgcgcaggcaagaaagtcgagtttaacgacaagcctaaagtcaaggagataccctccacgcgaaagattaagttcaactttgcgttggatgcgacttttgatagtgtcctttcgaaggcgtgttctgagtttgaagttgataaagacgttacattggatgagctgcttgatgttgtgcttgatgcagttgagagtacgctcagcccttgtaaggagcatgatgtgattggcacaaaagtttgtgctttacttaataggttggcagaagattatgtctacctctttgatgagggaggcgaggaagtgattgccccaaagatgtattgttccttttctgctccagatgatgaagactgcgtcgcagcggatgttgtggatgcagatgaaaaccaaggtgacgatgctgacgattctgcagcccttgtcaccgatacccaagaagaggacggtgttgccaaggggcaggttggtgtggctgagtcggatgcccgcctcgatcaagttgaggcatttgatattgaaaaggttgaggatcccatcttgaatgagctctcggctgaacttaatgcgccagcagacaagacctatgaggatgttttggcatttgatgccatttattcagaggcattgtctgcattctatgctgtgccaggtgatgaaacgcactttaaggtgtgtggattctattcgccagctatagagcgtactaattgttggctgcgttctactttgatagtaatgcagagcttacctttagaatttaaagatttggagatgcagaagctctggttgtcgtacaaatccagttataataaggaatttgtcgacaaactagttaagagcgtgcccaagtctatcattcttccacaaggtggctatgtggcagattttgcctacttctttttaagccagtgtagctttaaagcttatgctaactggcgctgtttaaagtgtgacatggacttaaagcttcaaggcttggatgccatgttcttttatggagatgtagtatcccatgtgtgtaagtgtggtactggcatgaccttgttgtctgcagatataccttacactttgcatttcggattgcgagatgataagttttgcgctttttacacgccaagaaaggtctttagggctgcttgtgcggtagatgttaatgattgtcactctatggctgtagtagagggcaagcaaattgatggtaaagtggttaccaaatttattggtgacaaatttgattttatggtgggttacgggatgacatttagtatgtctccttttgaactcgcccagttatatggttcatgtataacaccaaatgtttgttttgttaaaggagatgttataaaggttgttcgcttagttaatgctgaagtcattgttaaccctgctaatgggcgtatggctcatggtgcaggtgttgcaggtgctatagctgaaaaggcgggcagtgcttttattaaagaaacctccgatatggtgaaggctcagggcgtttgccaggttggtgaatgctatgaatctgccggtggtaagttatgtaaaaaggtgcttaacattgtaggaccagatgcccgagggcatggcaagcaatgttactcatttttagagcgtgcttatcagcatattaacaagtgtgacgatgttgttaccactttaatatcagctggtatatttagtgtgcctactgatgtttctctgacttatttaattggtgttgtgactaagaatgttattcttgtcagcaacaacaaagatgattttgatgttatagagaagtgtcaagtgacttccattgctggcactaaagcgctctcacttcaattggctaaaaatttgtgccgagatgtaaagtttgagacaaatgcatgtgattcgctttttagtgactcctgcttcgtctcaagctatgatgtgttgcaggaggttgaattgctgcgacatgacatacagttggatgatgatgcccgtgtctttgtgcaggcccatatggacaacctgcccgctgactggcgtctcgttaataagtttgatagtgttgatggtgttagaaccgttaaatattttgagtgtccgggtgagatttttgtatctagccagggcaagaagtttggttatgttcagaatggttcatttaaagtggcaagtgttagccaaataagggctttacttgctaataaggtggatgtcttgtgcaccgttgatggtgttaacttccgctcgtgctgtgttgcagagggtgaagtttttggcaagacattaggttcagtcttttgtgatggcataaatgtcaccaaggttaggtgtagtgccattcacaagggtaaggtcttctttcagtatagtggtctgtctgcggcagatctcgttgctgttaaggatgcctttggctttgatgaaccacagctgctgaagtactacaatatgctaggcatgtgtaagtggccagtagttgtttgtggcaattattttgcttttaagcagtcaaataataattgctatataaatgtggcatgtttaatgctgcaacatttgagtttaaagtttcataagtggcaatggcaggaggcctggaatgagttccgctctggtaagccactaaggtttgtgtccttggtcttggcaaagggcagctttaaatttaatgaaccttctgattcaactgattttatgcgtgtggtgctgcgcgaagctgatttgagtggtgccacatgcgattttgaatttgtttgtaaatgtggtgtaaagcaagagcagcgcaaaggtgttgacgctgttatgcattttggtacgttggataaaggtgatcttgccaagggttacactatcgcatgcacgtgcggtaataaacttgtgcattgcacccaacttaacgtaccatttttaatttgctccaacaagcctgagggtaagaaattgcctgatgatgttgttgcggctaatatttttactggtggtagtttgggacactacactcatgtgaaatgcaaacccaagtaccagctttatgatgcttgtaatgttagtaaggtctctgaggctaagggtaattttaccgattgcctctaccttaaaaatttaaaacaaactttttcgtccaagttgacgactttttatttagatgatgtaaagtgcgtggagtataatccggatttatcgcagtattactgtgagtctggaaaatattatacaaagcccatcattaaggcccagtttagaacatttgagaaggtagagggtgtctataccaattttaaattggtggggcacagcattgccgaaaaattcaatgctaagctgggatttgattgtaattctccctttacggagtataaaattacagagtggccgacagctactggagatgtggtgttggctagtgatgatttgtatgtgagccgttattcaggtggatgtgttacttttggtaagccggttatctggttgggccacgaggaagcatctctgaaatcgctcacatattttaatagacctagtgtcgtttgtgaaaataaatttaatgtgttgcctgttgatgtcagtgaacccacggataaggggcctgtgccggctgcagtccttgttaccggtgctctgagtggtgctgccactgcgcccggtactgccaaggagcaaaaggtgtgcgcttctgatagtgtggtggatcaggttgtctcggggttcttatcagacctgtctggtgcaaccgtggatgtcaaagaggttaaattgaatggtgttaaaaagcctattaaggtggaagatagtgtggttgttaatgaccccactagcgaaaccaaagttgttaaaagtttgtctattgtcgatgtgtatgatatgttcctgacagggtgtagatatgtggtctggatggctaatgagttgtcccggctagtaaattcacctactgttagggagtatgtgaagtggggtatgactaagattgtaatacccgctaaattggtgttgttaagagatgagaagcaagaatttgtagcgccaaaagtagtcaaggcgaaagttattgcctgctatagtgctgtgaagtggttcttcctctattgttttagttggataaagtttaatactgataataaggttatatacaccacagaagtagcttcaaagcttacttttaatttgtgctgtttggcgtttaagaatgccttacagacttttaattggaacgttgtgtctaggggctttttcctagtggcaacggtctttttattatggtttaactttttgtatgccaatgttattttgagtgatttctatttgcctaatattggtttctttcctacatttgtgggtcagattgtcgcttgggttaagaccacatttggtatttttaccctctgtgatctttatcaggtgtcagatgttggctatagaagttctttttgtaatggaagtatggtctgcgaactatgcttttcaggttttgacatgttggataactatgatgctataaatgttgttcagcatgttgtggataggcgagtgtcttttgactatattagcctatttaagttagtggtcgagcttgttatcggctactctttgtataccgtgtgtttctatccactgtttggccttattggcatgcagttgctgaccacatggttaccagaattctttatgctggaaactatgcattggagcgcgcgcttctttgtgtttgttgctaatatgcttccagcttttacgttactgcggttttatatcgtggtaacagctatgtataagatcttttgtctttgtagacatgttatgtatggatgtagtagaccaggttgtttgttttgctataagagaaaccgtagtgtccgtgttaagtgtagcactgttgttggtggtacgctacgctattacgatgtaatggctaatggcggcactggtttctgtgcaaagcatcagtggaactgtcttaattgcagcgcttttggacctggcaacacattcataactcatgaagcagcggcggatctctctaaagaattgaagcgccctgttaatccaacagattctgcttactatttggtcacagaggttaagcaggtaggttgttcaatgcgtctgttctacgagagagatggacagcgcgtttatgatgatgttagtgctagtttgtttgtggatatgaatggtctgctgcattctaaggttaaaggtgtgccagaaacacatgttgtagttgttgagaacgaagctgataaggcaggttttcttaatgctgctgttttttacgcacaatccctttatagaccgatgttgctggtagagaagaaattaataactaccgccaacacgggcttgtctgtgagtcagactatgtttgacctttatgtagactcactgctgggcgtcttggacgttgatcgcaagagtctaacaagttttgtgaatgctgcgcacaattccttaaaggagggtgtgcagcttgaacaagttatggatacctttattggttgcgctcgacgtaagtgtgctatagattcagatgttgagaccaagtctattaccaagtccatcatgtcggcagtaaatgctggtgttgattttacggatgagagttgtaacaacttggtacctacatatgtgaaaagcgacactatcgtcgcagccgatttgggtgttcttattcagaataatgctaagcatgtacaggctaatgttgctaaagctgctaatgtggcttgcatctggtctgtggatgcttttaatcagctatctgctgatctgcagcataggctgagaaaggcatgttcaaaaactggcttgaagattaagcttacttataataagcaggaggcaaatgtccctattttaactacaccgttctctcttaaagggggcgctgtgtttagtaaagttttgcaatggttgtttgttgttaatttgatttgtttcattgtactgtgggctcttatgccgacatatgcagtgcacaaatcagatatgcagttgcctttatatgccagttttaaagttatagataatggtgtgctaagggatgtgaccgttacggatgcatgctttgcaaacaaatttattcaatttgatcaatggtatgagtctacgtttggtcttgtctattaccgtaactctagggcgtgtcctgttgtggttgctgtcatagaccaagatattggctataccttatttaatgttcctactaaagtcttaagatatggatttcatgtgttgcattttataacccatgcatttgctactgatagcgtgcagtgttatacgccacatatgcaaatcccctatgataatttctatgctagtgggtgtgtcttgtcttccctctgtactatgctagcgcatgcagatggcacaccgcatccttattgctatacagagggcattatgcataatgcatctctgtatgactctttggctcctcatgttcgttataacctagctaattcaaatggttatatacgctttcctgaagtggttagtgaaggcattgtgcgtattgtgcgcactcgctccatgacctactgcagggttggcttatgtgaggatgctgaggagggtgtttgttttaactttaatagttcttgggtattgaataacccgtattatagggctatgcctggaactttttgtggtaggaatgcttttgatttaatacaccaagttttaggaggtttagtgcggcccattgacttctttgccctaacggcgagttcagtggctggtgctatcctagcaattattgttgttttagctttttattatttaataaagcttaaacgtgcctttggtgactatactagcgttgtggtcatcaatgtcattgtgtggtgtataaatttcctgatgctatttgtgtttcaggtttatcccactttatcttgtttatatgcttgtttttatttttacacgacgctttatttcccctcggagataagtgttgttatgcatttgcaatggctagtcatgtatggtgctattatgcccttgtggttttgcattatatacgtggcagttgttgtttcaaaccatgcattgtggctgttctcttactgccgtaagcttggtacagaagttcgtagtgatggtacatttgaggagatgtcccttactacttttatgattactaaagaatcctattgtaagttgaaaaattctgtttctgatgttgcttttaacaggtacttgagtctctataacaagtatcggtattttagtggtaaaatggataccgcggcctatagagaggctgcttgttctcaactagcaaaggcgatggaaacatttaaccataataatggtaatgatgttctctatcagccacctacggcctctgttactacatcatttttacagtccggtatagtgaagatggtgtttcccacctctaaggtggaaccttgtgttgttagtgtcacctatggtaacatgacacttaatgggttgtggttggacgataaagtttattgtccaagacatgtcatttgctcctcagctgacatgacagaccctgattattctaatttgctttgtagagtgatatcaagtgatttttgtgttatgtctggtcgtatgagccttactgttatgtcttatcaaatgcagggcagtctacttgttttgactgttacactgcaaaatcctaacacacctaagtactccttcggtgttgttaagcctggtgagacgtttactgttttggctgcatacaacggcaaatctcaaggagccttccatgttactatgcgtagtagctataccataaagggctccttcttgtgtggatcctgcggttctgtaggatatgttttaacgggcgatagtgtacgatttgtctacatgcatcagctagagttgagtactggttgtcacaccggtactgactttagtgggaacttttatggtccctatagagatgctcaagtcgtacaattgcctgttcaagattatacgcagactgttaatgttgtagcttggctttacgctgctattcttaatagatgcaattggtttgtgcaaagtgatagttgttccctggaagagtttaatgtttgggctatgaccaatggttttagttcaattaaagccgaccttgttctagatgctcttgcgtctatgacaggtgttacagttgaacagatcttggctgctattaagcggctgtatcctggctttcagggtaaacaaattttaggtagttgtgtgcttgaggatgagctgacgccaagcgatgtttatcaacaactagctggtgttaagttacagtcaaagcgcacaagagttgttaaaggtacatgttgctggatattggcttcaacattattgttttgtagcattatctcagcatttgtaaaatggactatgtttatgtatgttactacccatatgttgggtgttacattgtgtgcactttgctttgtgagctttgctatgctgttggttaagcataagcatttgtatttaactatgtttattatgccggttttgtgcacattgttttacacgaactatttagttgtgtataaacagagttttagaggcctagcttatgcatggctttcacactttgtccctgctgtagattatacatacatggatgaagttttatatggtgttgtgttgctagtagctatggtttttgttaccatgcgcagcataaatcacgatgtcttctctgttatgttcttggttggtagacttgtcagcttggtgtctatgtggtactttggggccaatttagaggaggaggtgctattgttcctcacatcactctttggcacgtatacatggactactatgctgtcattggctactgctaaggtcattgctaaatggttggctgtgaatgtcttgtacttcacagacgtaccgcaagttaaattagttcttttgagctatttgtgtattggttatgtgtgttgttgttattggggcgtcttgtcactccttaatagcatttttaggatgccgttgggtgtctataattataaaatctccgtgcaggagttacgctatatgaatgctaatggcttgcgcccgcccagaaatagttttgaagccctagtgcttaattttaaattgttgggaattggtggtgtgccagtcattgaagtatctcaaattcaatcaagattgactgatgttaaatgtgttaatgttgtgttgcttaactgcctccagcacttgcatattgcatctagttctaagttgtggcagtattgcagtactttgcataatgaaatattagctacatctgatttgagcgtggcctttgataagttggctcagctcctagtagtcttatttgctaatccagcagcagtggatagcaagtgtcttgcaagtattgaagaggtgagcgatgattacgttcgcgacagtactgtcttgcaagccctacagagtgaatttgttaatatggctagcttcgttgagtatgaacttgctaagaagaatttagatgaggccaaggctagcggctctgccaatcaacagcagattaagcaactagagaaggcttgtaatattgctaagtcagcatatgagcgcgacagagctgttgctcgcaagcttgaacgtatggctgatttggctcttacaaatatgtataaagaagctagaattaatgataagaagagtaaggtagtttctgcattgcaaaccatgctttttagtatgattcgtaagctggataaccaagctcttaattctattttagataatgcagttaagggttgtgtacctttgaatgcaataccatcattgacttcaaacactctgactataatagtgccagataagcaggtttttgatcaagttgtggataatgtgtatgtcacctatgctgggaatgtatggcatatacaatctattcaggatgctgatggcgctgttaaacaattgaatgagatagatgttaatataacctggcccctagtcattgctgcaaataggcataatgaagtgtctagtgttgttttgcagaacaatgagttgatgcctcagaagttgagaacgcaggttgtcaatagtggctcagatatgaattgtaatactcctacccagtgttattataatacgactggcatgggtaagattgtgtatgctatacttagtgactgtgatggtcttaagtacactaagatagtaaaagaagatggaaattgtgttgttttggagttggatcctccctgtaaattttcagttcaggatgtgaaggggcttaaaattaagtacctttactttgtgaaggggtgtaatacactggccagaggctgggttgttggcaccttatcctcgacagtgaggttgcaggcaggtacggcaactgagtatgcctccaactctgcaatactgtcgttgtgtgcgttttctgtagatcctaagaaaacgtacctggactatatacaacagggtggagctcccgttactaattgtgttaagatgttatgtgaccatgctggcactggtatggccattactattaagccggaggcaaccactaatcaggattcttatggtggtgcttccgtttgtatatattgccgctcgcgtgttgaacatccagatgttgatggattgtgcaaattacgcggcaagtttgtccaagtgcccttaggtataaaggatcctgtgtcatatgttttgacacatgatgtttgtcaggtctgtggcttttggcgagatggtagctgttcctgtgtaggcacaggctcccagtttcagtcaaaagacacgaactttttaaacgggttcggggtacaagtgtaaatgcccgtcttgtaccctgtgccagtggcttggacactgatgttcaattaagggcatttgatatttgtaatgctaatcgagctggcattggtttgtattataaagtgaattgttgccgttttcagcgcgcagatgaagatggcaacacgttggataagttctttgttattaaaagaaccaatttagaagtgtataataaggagaaagaatgctatgagttgacaaaagaatgtggtgttgtggctgaacacgaattcttcacattcgatgttgagggaagtcgtgtaccacacattgtacgcaaagatctttcaaagtatactatgttagacctttgctatgcattgcggcatttcgatcgcaatgattgttcaactctcaaggaaattctccttacttatgctgagtgtgatatcctactttcagaagaaggatggtatgattttgttgagaattctgatataattaatgtgtacaaaaagcttggacctatttttaatagggccttgcttaacactgctaagtttgcggacacattagtggaggcaggcctagtaggtgttttaacacttgataatcaagatttgtatggtcaatggtatgactttggagattttgtcaagacagtgcctggatgtggtgttgccgtggcagattcctattattcttatatgatgccaatgctgactatgtgtcatgcgttggatagtgagttgtttattaatggtacttatagggagtttgaccttgttcagtatgattttactgatttcaagttagagctctttaataagtattttaagtattggagtatgacctatcacccgaacacctgtgagtgcgaggatgacaggtgcattattcattgcgccaattttaatatactatttagtatggttttacctaagacctgttttgggcctcttgttaggcaaatctttgtagatggtgtgcctttcgttgtctcgattggctaccattataaagaattaggtgttgttatgaatatggatgtggatacacatcgttaccgcttgtctcttaaagacttgcttttgtatgcagcagatcctgcccttcatgtggcgtctgctagtgcactgcttgatttgcgcacatgctgttttagcgtagcagctattacaagtggcgtaaaatttcaaacagtcaaacctggaaattttaatcaggatttttatgagtttattttgagtaaaggcctgcttaaagaagggagctccgttgatttgaagcacttcttctttacgcaggatggtaatgctgctattactgattataattattacaagtataatctccccactatggtggatattaagcagttgttgtttgttctagaagttgttaataagtattttgagatctatgatggtgggtgtatacccgcaacacaggtcattgttaataattatgataagagcgctggctatccatttaataaatttggaaaggccagactctattatgaggcattatcatttgaggaacaggatgaagtttatgcgtacactaagcgcaacgtcctgccaacattaactcaaatgaatcttaaatatgctattagtgctaagaatagggctcgcactgttgctggtgtttccattcttagtactatgactggcagaatgtttcatcaaaagtgtttaaagagtatagcagctactcgtggtgttcctgtagttataggcaccacaaaattttatggcggttgggacgatatgttacgccgccttattaaagatgttgatagtcctgtacttatgggttgggactatcctaaatgtgatcgtgctatgccaaacatactgcgcattattagtagtttggtgttagcccgcaaacatgattcgtgctgttcgcatacagatagattctatcgtcttgcgaatgagtgcgcccaagttttgagtgaaattgttatgtgtggtggttgttattatgttaaaccaggtggcactagcagtggggatgcaaccactgcctttgctaattctgtttttaacatttgtcaagctgtctccgccaatgtgtgctcgcttatggcatgcaatggacacaaaattgaagatttgagtatacgcgagttacaaaagcgcctatactctaatgtgtatcgtgcggatcatgttgaccccgcatttgttaatgagtattatgagtttttaaataagcattttagtatgatgattttgagtgatgatggtgttgtgtgttataattcagagtttgcgtccaagggttatattgctaatataagtgcctttcaacaggtattatattatcaaaataatgtgtttatgtctgaggctaaatgttgggtcgaaacagacatcgaaaagggaccacatgaattttgttctcaacacacaatgctagtaaagatggatggtgatgaagtctaccttccatatcctgatccttcgagaatcttaggagcaggctgttttgttgatgatttattaaagactgatagcgttctcttgatagagcgattcgtaagtcttgcaattgatgcttatcctttagtataccatgagaacccagagtatcaaaatgtgttccgggtatatttagaatatataaagaagctgtacaacgatctcggtaatcagatcttggacagctacagtgttattttaagtacttgtgatggtcaaaagtttactgatgagaccttttacaagaacatgtatttaagaagtgcagtgatgcaaagcgtcggtgcctgcgtcgtctgtagctcccaaacatcattacgctgtggcagttgcatacgcaagccattgctgtgttgcaagtgcgcttatgatcatgttatgtctactgatcataaatatgtcctgagtgtgtcaccttatgtgtgtaattcgccgggatgtgatgtaaatgatgttaccaaattgtatttaggtggtatgtcatattattgtgaggaccataagccacagtattcattcaagttagtgatgaatggtatggtttttggtctatataaacaatcttgtactggttcgccctacatagaagattttaataaaatagctagctgtaaatggacagaagtcgatgattatgtgctagctaatgaatgtaccgagcgtctcaaattgtttgccgcagaaacgcaaaaggccactgaagagtcctttaagcaatgttatgcgtcagcaacgatccgtgagatcgtgagcgatcgggagttaattttatcttgggaaattggtaaagtgaggccaccacttaataaaaattatgtttttactggctaccattttacttctaatggtaagacagttttaggtgaatatgtttttgataagagtgagttgactaatggtgtgtattatcgcgccacaaccacttataagttgtctgttggtgatgtttttattttaacatcacatgcagtgtctagtttaagtgctcctacattagtaccgcaggagaattatactagcattcgctttgctagtgtttatagtgtgcctgagacgtttcagaataatgtgccaaattatcagcacattggaatgaagcgttattgtactgtacagggacctcctggtactggaaagtcccatctagccattgggctagctgtttattattgtacagcgcgtgtggtgtataccgctgctagccatgctgcagttgacgcgttgtgtgaaaaggcatataaatttttaaatattaatgactgcacgcgtattgttcctgcaaaggtgcgtgtagattgttatgataaatttaaggtcaatgacaccactcgtaagtatgtgtttactacaataaatgcattacccgagttggtgactgacattattgttgttgatgaagttagtatgcttaccaattatgagttgtctgttattaacagtcgtgttagggctaagcattatgtttatattggagaccctgctcagttgcccgcaccccgtgtgctactgaataagggcactctagaacctagatattttaattctgttaccaagctaatgtgttgcttgggtccagatattttcttgggtacctgttatagatgccctaaggaaattgtggatacagtgtcagccttggtttatcataataagctgaaggctaaaaatgataatagctccatgtgttttaaggtctattataaaggccagactacacatgagagttctagtgctgtcaatatgcagcaaatatatttaattagtaagtttttaaaggcaaaccccagttggagtaacgccgtatttattagtccttataatagtcagaactatgttgctaagagagtcttgggtttacaaacccagacagtagattcagcgcagggttctgaatatgattttgttatttattcacagactgcggaaacagcgcattctgtcaatgtaaatagattcaatgttgctattacacgtgctaagaagggtatcctctgtgtcatgagtagtatgcaattatttgagtctcttaattttagcacactgactctggataagatcaataatccacgattacagtgtactacaaatttgtttaaggattgtagcagaagctatgcaggttatcacccagctcatgcgccttcctttttggcagttgatgataaatataaggtaggtggcgatttagccgtttgccttaatgttgctgattctgctgtcacttattcgcggcttatatcactcatgggattcaagcttgacttgacccttgatggttattgtaagctgtttataactagagatgaagctatcagacgtgttagagcctgggtaggctttgatgcagaaggtgcccatgcgacgcgtgatagcattgggacaaatttcccattacaattaggcttttcgactggaattgattttgttgtcgaggccactggaatgtttgccgagagagatggctacgtctttaaaaaggcagtggcacgagcacctcccggcgaacaatttaaacacctcgtcccacttatgtctagaggacagaaatgggacgtggttcgaattcgaatagtacaaatgctgtcagaccacttagtggatttggcagacagtgttgtacttgtgacgtgggctgccagcttcgagctcacatgtttgcgatatttcgctaaagttggaaaagaagttgtgtgtagtgtctgcaacaagcgtgcgacatgttttaattctaggactgggtactatggatgctggcgacatagttattcctgtgattacctgtataacccactaatagttgatattcaacagtggggatatactgggtctttaactagcaatcatgacctcatttgcagcgtgcataagggtgctcatgtcgcatcttctgatgctatcatgacccgatgcttagctgtccatgattgcttttgcaaatctgttaattggagtttagaataccccattatctcaaatgaggttagtgttaatacctcctgcaggttattgcagcgtgtaatgtttagggctgcgatgctatgcaataggtatgatgtgtgttatgacattggcaaccctaaaggtcttgcctgtgtcaaaggctatgattttaagttttatgatgcctctcctgttgttaagtctgttaaacagtttgtttataagtatgaggcacataaagatcaatttttagatggtttatgtatgttttggaactgcaatgtggataagtatcccgcgaatgcagttgtatgtaggtttgacacgagagtgttaaacaaattaaatctccctggctgtaatggtggtagtctgtatgttaataaacatgcattccacaccagtccctttacgcgggcagccttcgagaatttgaagcctatgcctttcttttattactcagatacgccttgtgtgtatatggagggcatggagtctaagcaggtcgattatgtcccattgagaagcgccacttgcattacaagatgcaatttaggtggcgctgtttgtttaaaacatgctgaggattatcgtgagtaccttgagtcttacaatacggcaaccacagcgggttttaccttttgggtctataagacttttgatttttacaacctttggaatacttttactaggctccaaagtttagaaaatgtagtgtataatttggtaaatgctggacactttgatggacgggcgggtgaactgccttgtgccgttataggtgagaaagtcattgccaagattcaaaatgaggatgtcgtggtttttaaaaataacacgccattccctactaatgtggctgttgaattatttgctaagcgcagtattcgaccacacccagagcttaagctctttagaaatttgaatattgacgtgtgctggagtcacgtcctttgggattatgctaaggatagtgtgttttgcagttcgacgtacaaggtctgcaaatacacagatttacagtgcattgaaagcttgaatgtactttttgatggtcgtgataatggtgctcttgaagcttttaagaagtgccgggatggcgtctacattaacacgacaaaaattaaaagtctgtcgatgattaaaggcccacagcgtgccgatttgaatggcgtagttgtggagaaagttggagattccgatgtggaattttggtttgctatgcgtagagacggtgacgatgttatcttcagccgtacagggagccttgaaccgagccattaccggagcccacaaggtaatccgggtggtaatcgcgtgggtgatctcagcggtaatgaagctctagcacgtggcactatctttactcaaagcagatttttgtcctctttcgcacctcgatcagagatggagaaagactttatggatttagatgaagacgtgttcattgcaaaatatagtttacaggactacgcgtttgaacatgttgtttatggtagtttcaaccagaaaatcattggaggtttgcatttgcttattggcttagcccgtaggcagcaaaaatccaatctggttattcaagagttcgtcccgtacgactctagcatccactcgtactttatcactgacgagaacagtggtagcagtaagagtgtgtgcactgttattgatttgttgttaaatgattttgtggacattgtaaagtccctgaatctaaattgtgtgagtaaggttgttaatgtgaatgttgattttaaagatttccagtttatgttgtggtgcaatgaggagaaggtcatgactttctatcctcgtttgcaggctgccgctgattggaaacctggttatgttatgcctgtattatacaagtacttggaatcgccgctggaaagagttaatctctggaattatggcaagccgattactttacctacaggatgtttgatgaatgttgctaagtatactcaattatgccaatatttgaatactacaacattagcagtcccggctaatatgcgtgttttacacctcggagccggttctgataaggatgttgcccctggatctgcagttcttaggcagtggttaccagcaggcagcattcttgtagataatgatataaatccatttgtgagtgacagtgttgcctcatattatggaaattgtataaccttacccatagcgtgtcagtgggatttgataatttctgatatgtacgaccctcttactaagaacattggggagtacaacgtgagtaaagatggattctttacttacctttgtcatttaattcgtgacaagttggctctgggtggcagtgtcgccataaaaattacagagttttcttggaacgctgagttatatagtttaatggggaagtttgcgttttggacaatcttttgcaccaacgtaaacgcctcttcaagtgaaggatttttgattggcataaattggttaaataggacccgtaccgagattgacggtaaaaccatgcatgccaattatttgttttggagaaatagtacaatgtggaatggaggggcttacagtctttttgatatgagtaagttccctttgaaggtggctggtacggctgttgtaagcctaaagccagaccaaataaatgatttagtcctctccttgattgagaagggcaagttattagtgcgtgatacacgcaaggaagtatttgttggcgatagccttgtaaatgttaaataaatctatacttgtcatggctgcgatgcaggcctttgctgacaagcctaatcattttataaacttcccattggcccaatttagtggcgttatgggtaagtatttaaagcttcagtcgcaacttgtggaaatgggtttagactgtaaattacagaaagcaccacatgttagtattaccatgctcgatattagagcagatcaatacaaacaggtggaatttgcaatacaagaagtaatagatgatatggcggcatatgagggagatattgtctttgacaaccctcacatgcttggcagatgtcttgttcttgatgttaaaggatttgaagagttgcatgaagatatagttgaaattctccggaaaaggggttgcatagcagatcaatccagacaatggattcctcactgtactgtggcccaatttgaggaagaaaaagaaataaatgagctgcaattctattataaattacccttctacctcaagcataacaacatattaacggatgctaggcttgagcttgtgaagataggttcttccaaaacagatgggttctattgtagtgagctgagcatttggtgtggtgagagactttgttacaagcctccaacacccaaatttagtgatatatttggctattgctgcattgataaaatacgtgttgacttagaaattggtgacctacccgaggatgatgaagaagcgtgggccgagctaagttaccactatcaaagaaacacctacttcttccgctacgtacatgataatagcatttattttcgtaccgtatgcagaatgaagggttgtatgtgttgatttggttttacactagtagtgtaataagcttattattttgttgaaaagggcaggatgtgcatagctatggctcctcgcacactgcttttgctgatttgatgtcagctggtgtttgggttcaatgaacctcttaacatcgtttcacatttaaatgatgactggtttctatttggtgacagtcgttctgactgtacctatgtagaaaataacggtcatcctaaattagattggcttgacctcgacccaaagttgtgtaattcaggaaagatttccgcaaagagtggtaactctctctttaggagttttcacttcactgatttttacaattatacgggtgagggagaccaaattgtattttatgaaggagttaattttagtcccagccatggctttaaatgcctggctcatggagataataaaagatggatgggcaataaagctcgattttatgcccgagtgtatgagaagatggcccaatataggagcctatcgtttgttaatgtgtcttatgcctatggaggtaatgcaaagcccgcctccatttgcaaagacaatactttaacactcaataaccccaccttcatatcgaaggagtctaattatgttgattagtaccgctctgtggttttaatggccattccaagggcagctcttcggatgctgccaataaatattatactgactctcagagttactataatatggatattggtgtcttatatgggttcaattcgaccttggatgttggcaacactgctaaggatccgggtcttgatctcacttgcaggtatcttgcattgactcctggtaattataaggctgtgtccttagaatatttgttaagcttaccctcaaaggctatttgcctccataagacaaagcgctttatgcctgtgcaggtagttgactcaaggtggagtagcatccgccagtcagacaatatgaccgctgcagcctgtcagctgccatattgtttctttcgcaacacatctgcgaattatagtggtggcacacatgatgcgcaccatggtgattttcatttcaggcagttattgtctggtttgttatataatgtttcctgtattgcccagcagggtgcatttctttataataatgttagttcctcttggccagcctatgggtacggtcattgtccaacggcagctaacattggttatatggcacctgtttgtatctatgaccctctcccggtcatactgctaggtgtgttattgggtatagctgtgttgattattgtgtttttgatgttttattttatgacggatagcggtgttagattgcatgaggcataatctaaacatgctgttcgtgtttattctatttttgccctcttgtttagggtatattggtgattttagatgtatccagcttgtgaattcaaacggtgctaatgttagtgctccaagcattagcactgagaccgttgaagtttcacaaggcctggggacatattatgtgttagatcgagtttatttaaatgccacattattgcttactggttactacccggtcgatggttctaagtttagaaacttcgctcttacgggaactaactcagttagcttgtcgtggtttcaaccaccctatttaagtcagtttaatgatggcatatttgcgaaggtgcagaaccttaagacaagtacgccatcaggtgcaactgcatattttcctactatagttataggtagtttgtttggctatacttcctataccgttgtaatagagccatataatggtgttataatggcctcagtgtgccagtataccatttgtcagttaccttacactgattgtaagcctaacactaatggtaataagcttatagggttttggcacacggatgtaaaacccccaatttgtgtgttaaagcgaaatttcacgcttaatgttaatgctgatgcattttattttcatttttaccaacatggtggtactttttatgcgtactatgcggataaaccctccgctactacgtttttgtttagtgtatatattggcgatattttaacacagtattatgtgttacctttcatctgcaacccaacagctggtagcacttttgctccgcgctattgggttacacctttggttaagcgccaatatttgtttaatttcaaccagaagggtgtcattactagtgctgttgattgtgctagtagttataccagtgaaataaaatgtaagacccagagcatgttacctagcactggtgtctatgagttatccggttatacggtccaaccagttggagttgtataccggcgtgttgctaacctcccagcttgtaatatagaggagtggcttactgctaggtcagtccccagccctctcaactgggagcgtaagacttttcagaattgtaattttaatttaagcagcctgttacgttatgttcaggctgagagtttgttttgtaataatatggatgcttccaaagtgtatggcaggtgctttggtagtatttcagttgataagtttgctgtaccccgaagtaggcaagttgatttacagcttggtaactctggatttctgcagactgctaattataagattgatacagctgccacttcgtgtcagctgcattacaccttgcctaagaataatgtcaccataaacaaccataacccctcgtcttggaataggaggtatggctttaatgatgctggcgtctttggcaaaaaccaacatgacgttgtttacgctcagcaatgttttactgtaagatctagttattgcccgtgtgctcaaccggacatagttagcccttgcactactcagactaagcctaagtctgcttttgttaatgtgggtgaccattgtgaaggcttaggtgttttagaagataattgtggcaatgctgatccacataagggttgtatctgtgccaacaattcatttattggatggtcacatgatacctgccttgttaatgatcgctgccaaatttttgctaatatattgttaaatggcattaatagtggtaccacatgttccacagatttgcagttgcctaatactgaagtggttactggcatttgtgtcaaatatgacctctacggtattactggacaaggtgtttttaaagaggttaaggctgactattataatagctggcaaacccttctgtatgatgttaatggtaatttgaatggttttcgtgatcttaccactaacaagacttatacgataaggagctgttatagtggccgtgtttctgctgcatttcataaagatgcacccgaaccggctctaatctatcgtaatataaattgtagctatgtttttagcaataatatttcccgtgaggagaacccacttaattactttgatagttatttgggttgtgttgttaatgctgataaccgcacggatgaggcgcttcctaattgtgatctccgtatgggtagtgggctttgtgtcaactattcaacgtctcaccgcgctcgcagctctgtcagcacgggttataaattaactacttttgaaccatttacagtccgcattgtcaatgatagtgttgagtctgttgatgggttatatgagctgcaaataccaaccaactttactatagctagccatcaggagttcgttcaaacgaggtctccaaaggttactatagactgtgctgcatttgtctgtggtggccacacagcatgccgtcagcagttggttgagtacggctcattctgtgataatattaatgccattcttggcgaggtaaataacctcatagatactatgcaacttcaagttgcaagtgctttaatccaaggtgtcacgttaagctcacgcttatcggatggcattggtggtcaaatagatgatattaattttagtcctctgcttggttgtttaggttctgactgtggcgaagttaccatggcagctcaaaccggacgatctgctatagaggatgtattatttgacaaagtcaaactctctgatgttggctttgtcgaagcatataacaattgcactggaggccaagaagttagagacctactttgtgtgcaatcttttaatggcatcaaagtgctaccgcctgtgttgtctgagaatcaaatttctggttatacagcgggagctactgtatctgctatgttcccatggtctgcagctgcaggtgtgccattttctttaagtgttcaatatagaattaatggtcttggtgtcactatgaatgttcttagtgaaaatcagaaaatgatagcaagtgcatttaacaacgcgataggtgctatacaggaagggtttgctgcaaccaattctgccttagcaaaaatgcagttcgttgtcaatgcaaatgcggaagcactcaataatttattaaaccagctttccaataggtttggtgcaattagtgcttctttacaagaaattctatctcgcctagatgctcttgaagcgcaggctcagatagaccgtcttattaatggcagattaactgcacttaatgcatatgtctctaagcagctgagtgacatgacccttgttaaggtgagtgcagcccaggctatagagaaagttaatgagtgtgttaaaagccaatcatctaggataaatttctgtggcaatggcaatcatatattgtcattagtccagaatgcgccttatggtttatattttattcatttcagctatgtgcctacttcctttacaacggcaaatgtgagtcctgggctatgcatttctggtgatagaggattagcacctaaagctggatattttgttcaagatgatggagagtggaagttcacaggtagtaattattattaccctgaacccattacagataaaaatagtgtcgtgatgagtagttgcgcagcaaactacacaaaggcacctgaagttttcttgaacacttcaatacctaatctacccgactttaaggaggagttagataaatggtttaaaaatcagacgtctattgcgcctgatttatctctcgatttcgagaaattaaacgttaccctcctggacctgactgatgagatgaacaggattcaggatgcaattaagaagttaaatgagagttacatcaacctcaaggacgttggcacatatgaaatgtatgtgaaatggccttggtatgtgtggttgctaattggattagctggtgtagctgtttgtgtgttgttatttttcatatgttgctgcacgggttgtggctcatgttgtttcaagaagtgtggaaattgttgtgatgagtgtggaggacaccaggacagtattgtgatacataatatttcctctcatgaggattgactatcacagcctctcctggaaagacagaaaatctaaacaatttattgcactttccccgctacttggccccgtaagaggcagccatagctatggccgtgtagggtcctaaagctacattggctgctgtctttatcggtccatttattgtagcatgtatgctaggcattggcctagtttattcattgcaattgcaagtttaaatttttcatgttaatgataccatacgtgtgactggcaagccagccactgtgtcttatactataagtacaccagtaacgccgagtgccacgacgctcgacggtactacgtatactttaattagacccataagctcttatacaagagtttaccttggcaaaaccagagggtttgatactggtacatttggcccaaaggtcttggactatgttactaatctaaacctcatcttaattctggtcgtccatacaccttccgtaagcttggtttatgagaccgacagccacatggacatatggcatgtgagtgatgcttggttacgccgaacgcgagactttggtgtcactcgccttgaagatttttgctttcaatttaattattgccaacctcgaattggttattgtagagttcctttaaaggcttggtgtagcaaccagggtaaatttgcagcgcagtttacccttaaaagttgcgaaaaatcaggccaagaaatatttattactagcttcacggcctacgacaaaactgtcaaaaaggccgttagtaagctagtagaagaagctgttgattttatcatctggagagccacgcagctcgaaagatatgtttaatttattccttacagatacagtatggtatgtggggcagattatttttatagtcgcagtgtgtttgatggtcaccataatagtggttgccttccttgcgtctatcaaactttgtattcaactttgcggtttgtgtaatactttgttgctgtctccttctatttgtgtgtataataggagtaagcagctttataagtattataatgaagaagtgagaccgcccccgttagaggtggatgatataataatccaaacattatgaatagtaccactcaggctccacagcctgtttatcagtggacggctgatgaggcaattcgattccttaaggaatggaatttctctctcggcattatactactttttgttactatcatactacagttcggttacacgagccgtagcatgtttgtttatgttgtgaaaatgatacttttgtggcttatgtggccactaactattgttttgtgtatttttaactgcgtctatgcgctaaataatgtgtatcttggattttctatagtgtttactatagtgtccattataatgtggattatgtattttgttaatagcatcaggttgtttatcaggactggcagctggtggagcttcaaccccgaaacaaacaacctaatgtgtatagatatgaaaggtactgtgtatgttagacccattatagaggattaccatacactaacagccactatcattcgtggtcacctctatatgcaaggtgttaagctaggcactggcttctctttgtctgatttgcctgcttatgttacagttgctaaggtgtctcacctttgcacttataagcgcgcattcttagacaaggtagacggtgttagcggttttgctgtttatgtgaagtccaaggtcggaaattaccgactgccctcaaataaaccgagtggcatggacaccgcattgttgagaatctaatctaaactttaaggatgtcttttgttcctgggcaagaaaatgccggtagcagaagctcctctggaaaccgcgctggtaatggcatcctcaagaagaccacttgggctgaccaaaccgagcgtggaaatagaggcagaaggaaccatcccaagcagactgcaactactcagcccaatgccgggagtgtggttccccattactcttggttttcgggcatcacccagtttcaaaagggaaaggagttccagtttgcacaaggacagggagtgcctattgccagtggaatccccgcttcagagcaaaagggatattggtatagacacaaccgacgttcttttaaaacacctgatggccagcacaagcagctactgcccagatggtatttttactatcttggaacagggccccatgctggcgcagagtatggcgacgatatcgaaggagttgtctgggtcgcaagccaacaggccgacactaagaccactgccgatgttgttgaaagggacccaagcagtcatgaggctattcctactaggtttgcgcccggcacggtattgcctcagggcttttatgtagaaggctcgggaaggtctgcacctgctagtcgatctggttcgcggtcacaatcccgtgggccaaataatcgcgctagaagcagttccaaccagcgccagcctgcctctgctgtaaaacctgacatggccgaagaaattgctgctcttgttttggctaagcttggtaaagatgccggccagcccaagcaggtaactaagcaaagcgccaaagaagtcaggcagaaaattttaactaagcctcgtcaaaagaggactccaaacaagcagtgcccagtgcagcagtgttttgggaagagaggccctaatcagaactttggaggctctgaaatgttaaaacttggaactagtgatccgcagttccccattcttgcagagttggctccaacacctagtgccttcttctttggatctaaattagaattggtcaaaaagaactctggtggtgctgatgaacccaccaaagatgtttatgaattgcagtattcaggtgcaattagatttgatagtactctacccggttttgagactatcatgaaagtgttgactgagaatttgaatgcctaccaggaccaagctggtagtgtagatctagtgagcccaaagcctccaagaagaggtcgtagacaggctcaagaaaagaaagatgaagtagataatgtaagcgttgcaaagcccaaaagcttggtgcagcgaaatgtaagtagagaattaacccccgaggatcgtagcctgctggctcagatcctagacgatggcgttgtgccagatgggttggaagatgactctaatgtgtaaagagaatgaatcctatgtcggcgctcggtggtaacccctcgcgagaaagtcgggataggacactctctatcagaatggatgtcttgctgtcataacagatagagaaggttgtggcagaccctgtatcaattagttgaaagagattgcaaaatagagaatgtgtgagagaagttagcaaggtcctacgtctaaccataagaacggcgataggcgccccctgggaagagctcacatcagggtactattcctgcaatgccctagtaaatgaatgaagttgatcatggccaattggaagaatcacaaaaaaaaaaaaa

SEQ ID NO: 42 - DNA, 28033 bp, Coronavirus
acttaaaaagattttctatctacggatagttagctctttttctagaccttgtctactcaattcaactaaacagaaattttgtccttccttccggccgcatgttcatgctgctggaagctggcgtggaatttcattaggtttgcttaagtagccatcgcaagtgctgtgctgtcctctagttcctggttggcgttccgtcgccttctacatactagacaaacagccttcctccggttccgtctgggggttgtgtggataactagttccgtctagtttgaaaccagtaactgccggctatggctagcaaccatgtcacattggcgtttgccaatgatgcagaaatttcggcttttggcttttgcactgctagtgaagccgtctcatactattctgaggccgccgctagtggatttatgcaatgccgttttgtgtccctcgatctcgctgacactgttgagggattgcttcctgaagactatgtcatggtggtgatcggcactaccaagcttagtgcgtatgtggacacttttggtagccgccccagaaacatttgtggttggctgttattttctaactgtaattacttcctcgaagagttagagctcacttttggtcgtcgtggtggtaacatcgtgccagttgaccaatacatgtgtggcgctgacgggaaacctgttcttcaggaatccgagtgggagtatacagatttcttcgctgactccgaagacggtcaactcaacattgctgggatcacttatgtgaaggcctggattgtagagcgatcggacgtctcttatgcgagtcagaatttaacatctattaagtctattacttactgttcaacctatgagcatacttttcttgatggtactgccatgaaggttgcacgtactccaaagatcaagaagaatgttgttttgtctgagccacttgctactatctacagggaaattggttccccttttgtggataatgggagcgatgctcgttctatcattaggagaccagtgttcctccacgcttttgttaagtgtaagtgtggtagttatcattggactgttggtgattggacttcctatgtctccacttgctgtggctttaagtgcaagccagtccttgtggcctcatgctctgctatgcctggttctgttgtggtcacacgcgctggtgctggcactggtgttaagtactacaacaacatgttcctgcgccatgtggctgacattgatggattggcattctggcgaattcttaaggtgcagtccaaagacgacctcgcttgctctggtaagttccttgaacaccatgaggaaggtttcacagacccttgctactttttgaatgattcgagccttgctactaagcttaagttcgacatccttagtggcaagttttctgatgaagtcaaacaagctatcattgctggtcatgttgttgttggcagtgcactcgttgacattgttgacgatgcactgggacaaccttggttcatacgtaagcttggtgaccttgcaagtgcaccttgggagcagcttaaggctgtcgttagaggccttggcctcttgtctgatgaggttgtgctctttggcaaaagacttagctgtgccactcttagtatcgttaacggcgtttttgagtttctcgccgatgtgccagagaagttggctgcggctgttacagtttttgtcaacttcttgaatgagttctttgagtctgcctgtgactgcttaaaggtcggaggtaagacattcaacaaggttggttcctatgttctttttgacaatgcattggttaagcttgtcaaggcaaaagctcgcggcccacgacaggcaggtatttgtgaagttcgctacacaagcctggttgttgggagtactaccaaggtggtttccaagcgcgttgaaaatgccaatgtgaatctcgtcgtcgttgacgaggatgtaaccctcaacaccactggtcgtacagttgtcgttgatggacttgcattcttcgagagtgacgggttttacagacatcttgctgatgctgacgttgtcatcgaacatcctgtttataagtctgcttgtgagctcaagccagtttttgagtgtgacccaatacctgattttcctttgcctgtggccgctagtgttgcagagctctgtgtgcaaaccgatctgttgcttaaaaattacaacactccttataaaacttacagctgcgtagtgagaggtgataagtgttgcatcacttgcaccttacagttcaaagcaccaagttatgtggaggatgctgttaattttgtagacctatgtaccaagaacattggtactgctggttttcatgagttttacataacggcccatgaacaacaggatctgcaagggtttttaaccacttgttgcacgatgtcaggttttgagtgttttatgcctacaatcccacagtgtccagcagtgcttgaagagattgatggtggtagcatatggcggtcttttatcactggtcttaatacaatgtgggatttttgcaagcgtcttaaagtcagctttggactggatggcattgttgtcactgtagcacgcaaatttaaacgacttggtgctcttttggcagaaatgtataacacttatctttcaactgtggtggaaaacttggtactggccggtgttagcttcaagtattatgccaccagtgtcccaaaaattgttttgggcggttgttttcacagtgttaaaagtgtttttgcaagtgtcttccagattcctgtccaggcaggcattgagaagtttaaagttttccttaactgtgttcaccctgttgtaccacgtgtcattgaaacttcttttgtggaattagaagagacgacatttaaaccaccagcactcaatggtggtattgctattgttgatggcttcgctttctattatgatggaacactatactatcccaccgatggtaatagtgttgtgcctatctgttttaagaagaaaggtggtggtgatgttaaattctctgatgaagtctctgttaaaaccattgatccagtttataaggtctcccttgaatttgagttcgagtctgagactattatggctgtgcttaataaggctgttggtaatcgtatcaaggttacaggtggttgggatgatgtcgttgagtatattaacgttgccattgaggttcttaaagatcacgttgaagtgcctaagtactacatctatgatgaggaaggtggcactgatcctaatctgcccgtaatggtttctcagtggccgttgaatgatgacacgatctcacaggacctgcttgatgtggaagttgttacggatgcaccaattgattccgagggtgatgaagtagactcctctgcacctgagaaggtggcagatgtggctaactctgaacctggggatgatggtcttcctgtggcacctgaaacaaatgtagagtctgaagttgaggaagttgccgcaaccttgtcctttattaaagatacaccttccacagttactaaggacccttttgcttttgactttgtaagctacggaggacttaaagttttaagacaatctcataacaattgttgggttacttctaccttggtgcagctacaattgcttggcatcgttgatgaccctgcaatggaactttttagtgctggtagagttggtccaatggttcgcaaatgttatgagtcacaaaaggctattttgggatctttgggtgatgtgtcggcttgcctagagtctctgactaaggacctacacacacttaagattacctgttctgtagtctgcggttgtggtactggtgaacgtatctatgagggttgtgcttttcgtatgacgccaactttggaaccgtttccatatggtgcttgtgctcagtgtgctcaagttttgatgcacacttttaaaagtattgttggcaccggcatcttttgccgagatactactgctctctccttggattctttggttgtaaaacctctttgtgcggctgcttttataggcaaggatagtggtcattatgtcaccaatttttatgatgctgctatggctattgatggttatggtcgtcatcagataaagtatgacacactgaacaccatttgtgttaaagacgtgaattggacagcacctcttgtccctgccgttgattctgtagtggagcctgttgtcaaaccattctattcttataagaatgttgatttttaccaaggagattttagtgaccttgttaaacttccatgtgactttgttgttaatgctgcaaatgagaagttgtctcatggtggcggcatagcaaaggccattgatgtttataccaagggcatgttgcagaagtgttcaaatgattacattaaagcacacggtcccattaaagttggacgtggtgtcatgttggaggcattaggtcttaaggtctttaatgttgttggtccacgtaagggtaagcatgcacctgagcttcttgttaaggcttataagtccgtttttgctaactcaggtgttgctcttacacctttgattagtgttggaatttttagtgttcctttggaagaatctttatctgcttttcttgcatgtgttggtgatcgccactgtaagtgcttttgttatggtgacaaagagcgcgaggcgatcattaagtacatggatggcttggtagatgctattttcaaagaggcgcttgttgacactactcctgtccaggaagatgttcaacaagtttcacaaaaaccagttttgcctaattttgaacctttcaggattgaaggtgctcatgctttctatgagtgcaaccctgaaggtttgatgtccttaggtgctgacaagctggtgttgtttacaaattccaatttggatttttgtagtgttggtaagtgtcttaacgatgtgaccagcggtgcattgcttgaagccataaatgtatttaaaaagagtaacaaaacagtgcctgctggcaactgtgttactttagattgtgcaaatatgatttctattactatggtagtattgccatttgatggtgatgctaattatgacaaaaattatgcacgcgccgttgtcaaggtatctaagcttaaaggcaagttagtgcttgctgttgatgatgccacgttgtattccaagttgtcccacctcagcgtgttaggtttcgtgtccacacctgacgatgtggagcgtttctacgcaaataagagtgtggttattaaagtcactgaggatacacgtagtgtcaaggctgttaaagtagaatccactgctacttatggacaacaaattggaccttgtcttgttaatgacaccgttgtcacagacaacaaacctgttgtcgctgacgttgtagctaaggttgtaccaaatgctaattgggattcacattatggttttgataaggctggtgagttccacatgctagaccatactgggtttacctttcctagcgaagttgttaacggtaggcgtgtgattaaaaccacagataataattgttgggttaatgtcacatgtttacaattacagtttgctagatttaggttcaagtcagcaggtctacaggctatgtgggagtcctattgtactggtgatgttgctatgtttgtgcattggttgtactggcttactggtgttgacaaaggtcagcctagtgattcagaaaatgcacttaacatgttgtccaagtacattgttcctgctggttctgtcactattgaacgtgtcacgcatgacggctgttgttgtagtaagcgtgttgttactgcaccagttgtgaatgctagtgtgttgaagcttggcgtcgaggatggcctttgtccacatggtcttaactacattggcaaagttgttgtagttaaaggtactacaattgttgtcaatgtaggaaaacctgtagtggcaccatcacacctctttcttaagggtgtatcctacacaacattcctagataatggtaacggtgttgtcggccattatactgtttttgatcatggcactggtatggtgcatgatggcgatgcttttgtaccgggtgatcttaatgtatctcctgttacaaatgttgttgtctcagagcagacggctgttgtgattaaagaccctgtgaagaaagcagagttagacgctactaagctgctcgacactatgaattatgcatcggaaagatttttttcctttggtgatttcatgtcacgtaatttaattacagtgtttttgtacatccttagcattttgggtctctgttttagagcctttcgtaagagagatgttaaagttctagctggtgtaccccaacgtactggtattatattgcgtaaaagtatgcgctataatgcaaaggcgttgggtgtctttttcaagctaaagctttattggttcaaagttcttggtaagtttagtctgggtatttatgcattgtatgcattactattcatgacaatacgctttacacctataggtagccccgtctgtgatgatgttgttgctggttatgctaattctagttttgacaagaatgagtactgcaacagtgttatttgtaaggtctgtctctatgggtaccaggaactctcggacttctcccacacacaggttgtatggcaacaccttagagacccattaattggtaatgtgatgcctttcttttatttggcatttttggcaatttttgggggtgtctatgtaaaggctattactctctattttattttccagtaccttaatagtcttggtgtgtttttgggcctacagcagtccatttggtttttgcagctcgtgccttttgatgtctttggtgatgagatcgtcgtctttttcatcgttacacgcgtattgatgttcattaagcatgtttgccttggctgcgataaggcatcttgtgtggcttgctctaagagtgctcgccttaagcgcgttcctgtccagactatctttcagggtactagtaaatccttctacgtacatgccaatggtggttctaagttctgtaagaagcacaatttcttttgtttaaattgtgattcttatggtccaggctgcacttttattaacgacgtcattgcaactgaagttggtaatgttgtcaaacttaatgtgcaaccgacaggtcctgccactattcttattgacaaggttgaattcagtaatggtttctactatctttatagtggtgacacattttggaagtacaactttgacataacagatagcaaatacacttgcaaagaggcacttaaaaattgtagcataatcacagactttattgtttttaacaataatggttccaatgtaaatcaggttaagaatgcatgtgtgtatttttcacagatgctttgtaaacctgttaagttagtggactcagcgttgttggccagtttgtctgttgattttggtgcaagcttacatagtgcttttgttagtgtgttgtcgaatagtttcggcaaagacctgtcaagttgtaatgacatgcaggattgcaagagcacattgggttttgatgatgtaccattggatacctttaatgctgctgttgctgaggctcatcgctatgatgtcctcttgactgacatgtcattcaacaattttaccaccagttatgcaaaaccagaggaaaaatttcccgtccatgacattgccacgtgtatgcgtgtaggtgccaagattgttaatcataacgttcttgtcaaggatagtatacctgtggtgtggcttgtacgtgatttcattgccctttcggaagaaactaggaagtacattattcgtacgactaaagttaagggtataacatttatgttgacctttaatgattgtcgtatgcatactaccatacctactgtttgcattgcaaataagaagggtgcaggtcttcctagtttttcaaaggttaagaaattcttttggtttttgtgtctgttcatagttgctgctttctttgcactaagctttcttgattttagtactcaggttagcagtgatagcgattatgatttcaagtatattgagagtggccagttgaagacttttgacaatccacttagttgtgtgcataatgtctttattaacttcgaccagtggcatgatgccaagtttggtttcacccccgtcaacaatcctagttgtcctatagttgttggtgtatcagacgaagctcgcactgttccaggtatcccagcaggtgtttatttagctggtaaaacacttgtgtttgctattaacaccatttttggtacatctggtttgtgcttcgatgctagtggcgttgctgataagggcgcttgcatttttaattcagcttgcaccacattatctggtttgggtggaactgctgtctactgttacaagaatgggctagttgaaggtgccaaactttatagtgagttggcacctcatagctactataaaatggtagatggtaatgctgtgtctttacctgaaattatttcacgcggctttggcatccgtactatccgtacaaaggctatgacttattgccgtgttggccagtgtgtgcagtctgcagaaggcgtttgttttggcgccgatagattctttgtctataatgcagaatctggttctgactttgtttgtggcacagggctcttcacattgttgatgaacgttattagtgttttttccaagacagtaccagtaactgtgttgtctggtcaaatactttttaattgcattattgcttttgttgctgttgcggtgtgtttcttatttacaaagtttaagcgcatgttcggtgatatgtctgttggcgttttcactgtcggtgcttgtactttgttgaacaatgtttcttacattgtaacacagaacacacttggcatgttgggctatgcaactttgtatttcttgtgcactaagggtgttagatatatgtggatttggcacttgggatttttgatctcatatattcttattgcaccatggtgggttttgatggtttatgccttttcagccatttttgagtttatgcctaacctttttaagcttaaggtttcaacacaactttttgagggcgacaagttcgtaggctcttttgaaaatgctgcagcaggtacatttgtgcttgatatgcatgcctatgagagacttgccaactctatctcaactgaaaaactgcgtcagtatgctagtacttacaataagtacaagtattattcaggcagtgcttcagaggctgattacaggcttgcttgttttgcccatttggccaaggctatgatggattatgcttctaatcataacgatacgttatacacaccacccactgtgagttacaattcaactctacaggctggcttgcgtaagatggcacaaccttctggtgttgttgagaagtgcatagtccgtgtttgctatggtaatatggctcttaatggcctatggcttggcgatattgttatgtgcccacgccatgttatagcgtctagtactactagcactatagattatgattatgccctttctgttttacgcctccacaacttctccatttcatctgggaatgttttcctaggtgttgtgagtgcaactatgcgaggtgctttgttgcagataaaggttaatcaaaacaatgtccacacgcctaagtacacctatcgcacagttagaccgggtgaatcttttaatattttggcgtgctatgatggtgctgcagctggtgtttacggcgttaacatgcgctctaattacactattagaggctcgttcattaatggcgcttgtggttcacctggttataatattaacaatggtaccgttgagttttgctatttacaccagcttgaacttggttcaggctgtcatgttggtagcgacttagatggtgttatgtatggtggttatgaggaccaacctactttgcaagttgaaggcgctagtagtctgtttacagagaatgtgttggcatttctttatgcagcactcattaatggttctacctggtggcttagttcttctaggatcgctgtagacaggtttaatgagtgggctgttcataatggtatgacaacagtgggcaatactgattgcttttctattcttgctgctaagactggagttgatgtacaacgtttgttggcctcaatccagtctctgcataagaattttggtggaaagcaaattcttggccatacctcgttgacagatgagtttactacaggtgaagttgtacgtcaaatgtatggcgttaatcttcagggtggctatgtgtcacgcgcctgcagaaatgtcttgctggttggttcttttctgactttcttttggtcagaattagtttcctacactaagttcttctgggtaaatcctggttatgttacacctatgtttgcgtgcttgtcattgctatcctcacttttgatgttcacactcaagcataagacattgtttttccaggtcttcttaatacctgctctgattgttacatcttgcattaatttggcatttgatgttgaagtctacaactatttggcagagcattttgattaccatgtttctcttatgggttttaatgcacaaggtcttgttaacatctttgtctgctttgttgttaccattttacacggcacatacacatggcgcttctttaatacacctgcgagttctgtcacttatgtggtagctttgctgactgcggcctataactatttttacgctagtgacattcttagttgtgctatgacactatttgctagtgtgactggcaactggttcgttggtgctgtttgttataaagttgctgtgtatatggccttgagatttcctacgttcgtggctatttttggtgatattaagagtgttatgttctgttaccttgtgttgggttattttacctgttgcttctacggtattctctactggttcaacaggttctttaaggttagtgtaggtgtctatgactatactgttagtgctgctgagtttaagtatatggttgctaatggcctacgtgcaccaactggaacacttgattcactactgttgtccgccaaattgattggtattggtggtgagcggaatattaagatttcttccgttcagtctaaactgactgatattaagtgtagtaacgttgtgcttttaggctgtctttctagcatgaatgtttcagcaaattcaacagaatgggcttattgtgttgacttgcataacaagatcaacttgtgtaatgacccagaaaaagcgcaggaaatgctacttgctttgttggcatttttccttagtaagaatagtgcctttggtttagacgacttattggaatcttattttaatgacaatagtatgttgcagagtgttgcatctacttatgtaggtttgccttcctatgtcatttatgaaaatgcacgccaacagtatgaagatgctgttaataatggttctccacctcagttggttaagcaattgcgccatgctatgaatgtagcaaagagcgaatttgaccgtgaggcttctactcagcgtaagcttgatagaatggcggaacaggctgcagcacagatgtataaagaggcaagggcagttaataggaagtccaaagttgtaagtgctatgcattcactgctttttggtatgttgagacgtttggatatgtcttctgtagacaccattctcaacttggcaaaggatggggtggtacctctgtctgtcataccggcagtcagtgctactaagcttaacattgttacctctgatatcgattcttataatcgtatccagcgtgagggatgtgtccactacgctggtaccatttggaatataattgatatcaaggacaatgatggcaaggtggtacacgttaaggaggtaaccgcacagaatgctgagtccctgtcatggcccctggtccttgggtgtgagcgtattgttaagctccagaataatgagattattcctggtaagctgaagcagcgctccattaaggcagaaggagatggcatagttggagaaggtaaggcactttacaataatgagggtggacgtacttttatgtatgctttcatttcagataaaccggacctgcgtgtagttaagtgggagttcgatggtggttgtaacactattgagctagaaccaccacgtaagttcttggtggattctcctaatggtgcacagatcaagtatctctactttgttcgtaaccttaacacgttgcgtaggggtgctgttcttggctacataggtgccactgtacgcttgcaggctggtaaacaaacagaacaggctattaactcttcattgttgacactttgcgctttcgctgtggatcctgctaagacctacatcgatgctgttaaaagtggtcacaaaccagtaggtaactgtgttaagatgttggccaatggttctggtaatggacaagctgttactaatggtgtggaggctagtactaaccaggattcatatggtggtgcttccgtgtgtctatattgtagagcacatgttgagcatccatctatggatggtttttgcagactgaaaggcaagtatgtacaggtgccactaggtacagtggatcctatacgttttgtacttgagaatgacgtttgcaaggtttgtggttgttggctgtctaatggctgcacttgtgacagatccattatgcaaagcactgatatggcttatttaaacgagtacggggctctagtgcagctcgactagagccctgtaatggtactgatacacaacatgtgtatcgtgcttttgacatctacaacaaggatgttgcttgtctaggtaaattcctcaaggtgaactgtgttcgcctgaagaatttggataagcatgatgcattctatgttgtcaaaagatgtaccaagtctgcgatggaacacgagcaatccatctatagcagacttgaaaagtgtggggccatagccgaacacgatttcttcacttggaaggatggtcgtgcaatctatggtaacgtttgtagaaaggatcttaccgagtatactatgatggatctgtgttacgctttacgtaactttgatgaaaacaattgcgatgttcttaagagcattttgattaaggtaggtgcttgtgaggagtcctactttaataataaagtctggtttgaccctgttgaaaatgaagacattcatcgtgtctatgcattgttaggtaccattgttgcacgtgctatgcttaaatgcgttaagttctgtgatgcaatggttgaacaaggtatagttggtgttgtcacattagataatcaggatcttaatggtgatttttatgattttggtgattttacttgtagtatcaagggaatgggtgtacccatttgcacatcatattactcttatatgatgcctgttatgggtatgactaattgccttgctagtgagtgttttgttaagagtgatatatttggtgaggattttaagtcatatgacctgctggaatatgatttcacggagcataagacagcactcttcaacaagtatttcaagtattggggactgcaataccaccctaactgtgtggactgcagtgatgagcagtgcatagttcactgtgccaacttcaatacgttgttttccactaccatacctattacggcatttggacctttgtgtcgcaagtgctggattgatggtgttccactggtaactacagctggttatcattttaaacagttaggtatagtttggaataatgacctcaacttacactctagcaggctctctattaatgaattactccagttttgtagtgatcctgcactgcttatagcatcatcaccagcccttgttgaccagcgtactgtttgcttttcagttgcagcgctaggtacaggtatgactaaccagactgtgaaacctggccatttcaataaggagttttatgacttcttacttgagcaaggtttcttctctgagggctctgagcttactttaaagcacttcttctttgcacagaaggttgatgcagctgttaaggattttgactactataggtataatagacccactgttctggacatctgccaagctcgcgtcgtgtatcaaatagtgcaacgctattttgatatttacgagggtggttgtatcactgctaaagaagtggttgttacaaaccttaacaagagcgcaggctatcctttgaacaagtttggtaaagctggtctttactatgagtctttatcctatgaggaacaggatgaactttatgcttatactaagcgtaacatcctgcccactatgacacagctcaaccttaaatacgctattagtggcaaagaacgtgcacgcacagtgggtggtgtctcgcttttgtcaaccatgaccactcggcagtatcatcagaaacaccttaaatccatagttaatactaggggcgcttcggttgttattggtactactaagttttatggtggttgggacaatatgcttaagaaccttattgatggtgttgaaaatccgtgtcttatgggttgggattacccaaagtgcgatagagcactgcccaatatgatacgcatgatttcagccatgatcttaggctctaagcacaccacatgctgcagttctactgaccgctttttcaggttgtgcaatgaattggctcaagtccttactgaggttgtttattctaatggagggttttatttgaagccaggtggtactacctctggtgatgcaaccaccgcatatgcaaactcagttttcaatatcttccaagcagtaagtgccaatgttaacaaacttcttagtgttgacagcaatgtctgtcataacttagaagttaagcaattacaacgtaagctctatgagtgctgttatagatcgactatcgtcgatgaccagttcgtcgttgagtattatggttacttgcgtaaacatttttcaatgatgattctttctgatgatggcgttgtttgttataacaatgactatgcatcacttggttatgtcgcggatcttaacgcattcaaggctgttttgtattaccagaacaacgtcttcatgagcgcctctaaatgttggatcgagcctgacattaataaaggtcctcatgaattttgttcgcagcatactatgcagattgtcgataaggagggtacttattaccttccttaccctgatccttcaagaatcctctctgcaggtgtgtttgttgatgacgttgttaaaactgatgcagttgtattgcttgaacgttatgtgtcattggctatagatgcctacccgttatctaagcatgaaaaccctgaatataagaaggtgttttatgtgcttttggattgggttaagcatctgtataaaactttgaatgctggtgtgttagagtctttttctgtcacacttttggaagattctactgctaaattctgggatgagagcttttatgccaacatgtatgagaaatctgcagttttacaatctgcagggctttgtgttgtttgtggctctcaaactgttttacgttgtggtgattgtctacggcgtcctatgctttgtactaagtgtgcttatgatcatgtcattggaacaactcacaagttcattttggccatcactccatatgtgtgttgtgcttcagattgtggtgtcaatgatgtaaccaagctctacttaggtggtcttagttactggtgtcatgaacacaagccacgtcttgcattcccgttgtgctctgctggtaatgtttttggcttatacaaaaattctgctaccggttcacccgatgttgaagactttaatcgcattgctacatccgattggactgatgtttctgactacaggttggcaaatgatgtcaaggactcattgcgtctatttgcagcggaaactatcaaggccaaggaggagagcgttaagtcatcctatgcttgtgcaacactacatgaggttgtaggacctaaagagttgttgctcaaatgggaagtcggcagacccaaaccacctcttaatagaaattcggttttcacttgttatcatataacgaagaacaccaaatttcaaatcggtgagtttgtgtttgagaaggcagaatatgataatgacgctgtaacatataaaactaccgccacaacaaaacttgttcctggcatggtttttgtgcttacctcacataatgttcagccattgcgtgcaccaaccattgctaatcaagaacgttattccactatacataagttgcatcctgcttttaacatacctgaagcttattctagcttagtgccctattaccaattgattggtaagcagaagattacaactatccagggaccccccggtagtggtaaatctcactgtgttatagggctaggtttgtactatccaggtgcacgtattgtgtttacagcttgttctcatgcagcggtcgattcactctgtgtgaaggcctccactgcttatagcaatgacaaatgttcacgcatcataccacagcgtgctcgtgttgagtgttatgatggtttcaagtctaataatactagtgctcagtaccttttctccactgtcaatgctttgccagagtgtaatgcggacattgttgtggtggatgaagtttctatgtgcactaattatgacttgtctgtcataaatcagcgcatcagctataggcatgtagtctatgttggtgaccctcaacagctgcctgcaccacgtgttatgatttcacgtggtactttggaaccaaaggactacaatgttgtcactcaacgtatgtgtgcccttaagcctgatgtcttcttgcacaagtgttatcgctgtcctgcagagatagtgcgcactgtgtctgagatggtctatgaaaaccaattcattcctgtgcaccctgacagcaagcagtgttttaagatcttttgcaagggtaatgtgcaggttgataacggttcaagtattaaccgcaggcaattggatgttgtgcgtatgtttttggctaaaaatcctaggtggtcaaaggctgttttcatttccccttataacagccagaattatgttgccagccgtttgctaggtttacaaattcagacagttgattcatcccagggtagtgagtatgactatgtcatttacgcacaaacctcagatactgcccatgccagtaatgttaacaggtttaatgttgccatcacaagggctaagaaaggcatattatgtataatgtgcgataggtccctttttgatctgcttaaattttttgagcttaaattgtctgatttgcaggctaatgagggttgtggtctttttaaagactgtagcagaggtgatgatttgttgccaccgtctcatgctaataccttcatgtctttagcggacaattttaagactgatcaatatcttgctgttcaaataggtgttaatggacccattaaatatgagcatgttatctcgtttatgggtttccgttttgatattaacatacccaaccaccacactctcttttgcacacgcgactttgccatgcgcaatgttagaggttggttgggttttgacgttgaaggagcacatgttgttggctctaacgtcggtacaaatgtcccattgcaattagggttttctaacggtgttgattttgttgtcagacctgaaggttgcgttgtaactgagtctggtgactacattaaacccgtcagagctcgtgctccaccaggggaacaattcgcacaccttttgcctttacttaaacgcggccaaccatgggatgtggttcgcaagcgtatagttcaaatgtgtagtgactacctggctaacctatcagacatactaatttttgtgttgtgggctggtggtttggagttgacaactatgcgttactttgtcaagattggaccaagcaagagttgtgattgtggtaaggttgctacttgttacaatagtgcgctgcatacgtactgttgtttcaaacatgcccttggttgtgattatctgtataacccatactgtattgatatacagcagtggggatacaagggatcacttagccttaaccaccatgagcattgtaatgtacatagaaacgagcatgtggcttctggtgatgccataatgactcgctgtctggccatacatgattgctttgtcaagaacgttgactggtccatcacatacccatttattggtaatgaggctgttattaataagagcggccgcattgtgcaatcacacactatgcgttcagttcttaagttatacaatccaaaagccatatatgatattggcaatcctaagggcattagatgcgccgtaacggatgctaagtggttctgctttgacaagaatcctactaattctaatgtcaagacattggagtatgactatataacacacggccaatttgatgggttgtgcttgttttggaattgcaatgtggacatgtatccagaattttctgtggtctgtcgttttgatactcgctgtaggtcaccactcaacttggagggttgtaatggtggttcactgtatgttaacaatcatgcattccacacaccggcttttgacaagcgtgcttttgctaagttgaagccaatgccatttttcttctatgatgatactgagtgtgacaagttacaggactccataaactatgttcctcttagggctagtaactgcattactaaatgtaatgttggtggagctgtttgtagtaagcattgtgctatgtatcatagctatgtcaatgcttacaacacctttacgtcagcgggctttacgatttgggtgcccacttcgtttgacacctataatctgtggcagacatttagtaacaatttgcaaggtcttgagaacattgctttcaatgttttaaagaaaggatcttttgttggtgatgaaggtgagcttcctgtagctgtggtcaatgacaaagtgctcgttagagatggtactgttgatactcttgtttttacaaacaagacatcactacccactaacgtagcttttgagttgtatgccaagcgtaaggtaggactcacccctcccattacgatcctacgtaacttgggtgttgtttgtacatctaagtgtgtcatttgggactatgaagccgaacgtccacttactacttttacaaaggatgtctgtaaatataccgactttgagggtgacgtttgtacactctttgataacagcattgttggttcattagagcgattctctatgacccagaatgctgtgcttatgtcacttacagctgttaaaaagcttactggcataaagttaacttatggctatcttaatggtgtcccagttaacacacatgaagataaaccttttacttggtatatttacactaggaagaacggcaagttcgaggactatcctgatggctattttacccaaggtagaacaaccgctgattttagccctcgtagcgacatggaaaaggacttcctaagtatggatatgggtttgtttattaacaagtacggacttgaagattacggctttgagcacgttgtgtatggtgatgtttcaaaaaccacccttggtggtttacatctactaatttcgcaggtgcgtctggcctgtatgggtgtgcttaaaatagacgagtttgtgtctagtaatgatagcacgttaaagtcatgtactgttacatatgctgacaaccctagtagtaagatggtttgcacgtatatggatctcctgcttgacgattttgttagcattcttaaatctttggatttgagcgttgtatctaaggttcatgaagttatggttgattgtaaaatgtggaggtggatgttgtggtgtaaggatcataaactccagacattttatccacaacttcaagccagtgaatggaagtgtggttattccatgccttctatttacaagatacaacgtatgtgcttagaaccttgcaatctctataactatggtgctggtgttaagttacctgatggcattatgtttaacgtagttaaatacacacagctttgtcaatatctcaatagcaccacaatgtgtgtaccccatcacatgcgtgtgctacatcttggtgctggctccgataagggtgttgcacctggcacggctgtcttacgacgttggttgccactggatgccattatagttgacaatgatagtgtggattacgttagcgatgctgattatagtgttacaggagattgctctaccttatacctgtcagataagtttgacttagttatatctgatatgtatgatggtaagattaaaagttgtgatggggagaacgtgtctaaagaaggcttctttccctatattaatggtgttatcactgaaaagttggcacttggtggtactgtagctattaaggtgacggagtttagttggaataagaagttgtatgaactcattcagaagtttgagtattggacaatgttctgtaccagtgttaacacgtcatcgtcagaggcatttttaattggtgttcactatttaggtgattttgcaagtggcgctgtgattgacggcaacaccatgcatgccaattatatcttctggcgtaattccacaattatgactatgtcttacaacagtgtgcttgatttaagcaagttcaattgtaagcataaggctacagttgttgttaatttaaaagactcatccattagtgatgttgtgttaggcttgttgaagaatggtaagttgctagtgcgtaataatgacgccatttgtggcttttctaatcatttggtcaacgtaaacaaatgaggtctttaatttacttctggttgctcttaccagtacttccaacactcagcctaccacaagatgtcactaggtgccagtctactactaactttaggcggttcttttcaaaatttaatgttcaggcacctgccgtcgtcgttttgggtggttacctacctagtatgaactcttctagctggtactgtggcacaggcattgaaactgctagtggcgttcatggtatttttctcagctacatcgattctggtcagggctttgagattggcatttcgcaagagccgtttgatcctagtggttaccagctttatttacataaggccactaatggtaacactaatgctattgcacgactgcgcatttgccagtttcccgataataaaacattgggccctactgttaatgatgttacaacaggtcgtaactgcctattcaacaaagccattccagcttatatgcgtgatggaaaagatattgttgtcggcataacatgggataatgatcgtgtcactgtttttgctgacaagatctatcatttttatcttaaaaatgattggtcccgcgttgcgacaagatgttacaatcgcagaagttgtgctatgcaatatgtttatacacctacctactacatgcttaatgttactagtgcaggtgaggatggcatttattatgaaccctgtacagctaattgcactggttacgctgccaatgtatttgccactgattccaatggccatataccagaaggttttagttttaataattggtttcttttatccaatgactccactttgttgcatggtaaagtggtttccaaccaacccttgttggtcaattgtcttttggccattcctaagatttatggactaggccaatttttctcattcaatcacacgatggatggcgtttgtaatggagctgctgtggatcgtgccccagaggctctgaggtttaatattaatgacacctccgtcattcttgctgaaggctcaattgtacttcatactgctttaggaacaaatctttcttttgtttgcagtaattcctcagatcctcatttagccatctttgccatacctctgggtgctactgaagtaccctactattgctttcttaaagtggatacttacaactccactgtttataaattcttggctgttttacctcctactgtcagggaaattgtcatcaccaagtatggtgatgtttatgtcaatgggtttggctatttgcatctcggtttgttggatgctgtcacaattaatttcactggtcatggcactgacgatgacgtttcaggtttctggaccatagcatcgactaattttgttgatgcactcatcgaggttcaaggaacttccattcagcgtattctttattgtgatgatcctgttagccaactcaagtgttctcaggttgcttttgaccttgacgatggtttttaccccatctcttctagaaaccttctgagtcacgaacagccaatttcttttgttactttgccatcatttaatgatcattcttttgttaatattactgtctctgcggcttttggtggtcttagtagtgccaatctcgttgcatctgacactactatcaatgggtttagttctttctgtgttgacactagacaatttaccattacactgttttataatgttacaaacagttatggttatgtgtctaaatcacaggatagtaattgtcctttcaccttgcaatctgttaatgattacctgtcttttagcaaattttgtgtttcaaccagccttttggctggtgcttgtaccatagatctttttggttaccctgcgttcggtagtggtgttaagttgacgtccctttattttcaattcacaaaaggtgagttgattactggcacgcctaaaccacttgaaggtatcacagacgtttcttttatgactctggatgtgtgtaccaagtatactatctatggctttaaaggtgagggtattattacccttacaaattctagcattttggcaggtgtttattatacatctgattctggacagttgttagcctttaagaatgtcactagtggtgctgtttattctgtcacgccatgttctttttcagagcaggctgcatatgttaatgatgatatagtgggtgttatttctagtttgtctaactccacttttaacaatactagggagttgcctggtttcttctaccattctaatgacggctccaattgtacagagcctgtgttggtgtatagtaacataggtgtttgtaaatctggcagtattggctatgttccatctcagtatggccaagtcaagattgcacccacggttactgggaatattagtattcccaccaactttagtatgagtattagaacagaatatttacagctttacaacacgcctgttagtgttgattgtgctacatatgtttgtaatggtaactctcgttgtaaacaattactcacccagtacactgcagcatgtaagaccatagagtcagcattacaactcagcgctaggcttgagtctgttgaagttaactctatgcttaccatttctgaagaggctttacagttagctaccatcagttcgtttaatggtgatggatataactttactaatgtgctgggtgcttccgtgtacgatcctgcaagtggcagggtggtacaaaaaaggtctgttattgaagacttgctttttaataaagtggttactaatggccttggtactgttgatgaagactataagcgctgttctaatggtcgctctgtggctgatctagtctgtgcgcagtattactctggtgtcatggtactacctggcgttgttgacgctgagaagcttcacatgtacagtgcgtctctcataggtggtatggcgctaggaggtataactgctgcagcggcattgccttttagctatgctgttcaagcgagactcaattatcttgctttacagacggatgttctacagcggaaccagcaattgcttgctgagtcttttaactctgctattggtaatataacttcagcctttgagagtgttaaagaggctattagtcaaacttccaagggtttgaacactgtggctcatgcgcttactaaggttcaagaggttgttaattcgcagggttcagctttgaaccaacttaccgtacagctgcaacacaacttccaagccatttctagttctattgatgacatttattcccgactggacattctttcagccgatgttcaggttgatcgtctcatcaccggcagattatcagcacttaatgcttttgttgcccaaaccctcactaagtatactgaggttcaggctagcaggaagctagcacagcaaaaggttaatgagtgcgtcaaatcgcaatctcagcgttacggtttttgtggtggtgatggcgagcacattttctctctggtacaggccgcacctcagggcctgctgttcttacatacagtacttgtaccgggtgattttgtaaatgttcttgccatcgctggcttatgcgttaatggtgaaattgccttgactctacgtgagcctggcttagtcttgtttacgcatgaacttcaaacttatactgcgacggaatattttgtttcatcgcgacgtatgtttgaacctagaaaacctaccgttagtgattttgttcaaattgagagttgtgtggtcacctatgtcaatctgactagcgaccagctaccagatgtaatcccagattacatcgatgttaacaaaacacttgatgagattttagcttctctgcccaatagaactggtccaagtcttcccctagatgtttttaatgccacttatcttaatcttactggtgaaattgcagatctagagcagcgttcagagtctctccgtaatactacagaagagctccgaagtctcattaacaacatcaacaacacacttgttgaccttgagtggctcaaccgagttgagacatacatcaagtggccgtggtgggtttggttgatcattgttattgttctcatctttgttgtgtcattactagtgttctgctgcatttccacgggttgttgtggatgctgcggttgctgcggtgcttgtttttcaggttgttgtaggggtcctagacttcaaccttacgaagcttttgaaaaggtccacgtgcagtgatgtttcttggactttttcaatacacgattgacacagttgtcaaagatgtctcgaagtctgtcaacttgtctttggatgctgtccaagagttggagctcaatgtagttccaattagacaagcttcaaatgtgacgggttttcttttcaccagtgtttttgtttacttctttgcactgtttaaagcgtcttctttgaggcgcaattatattatgttggcagcgcgttttgctgtcgtctttctctattgcccacttttatattactgtggtgcacttttagatgcaactattatttgttgcgcacttattggcaggctttgtttagtctgcttttactcctggcgctataaaaatgcgctttttattatctttaatactacgacactttcttttctcaatggtaaagcagcttattatgacggcaaatccattgtgattctagaaggtggcgaccattacatcacttttggcaactcttttgttgctttcgttagtaacattgacttgtatctagctatacgtgggcggcaagaagctgacctacatctgttgcgaactgttgagcttcttgatggcaagaagctttatgtcttttcgcaacatcaaattgttggcattactaatgctgcatttgactcaattcaactagacgagtatgctacaattagtgaatgataatggtctagtagttaatgttatactttggcttttcgtactctttttcctgcttattataagcattaccttcgtccaattggttaatctgtgcttcacttgtcaccggttgtgtaatagcgcagtttatacacctatagggcgcctgtatagagtttataagtcttacatgcgaattgaccccctccccagtactgttattgacgtataaacgaaatatgtctaacggttctattcccgttgatgaggtgattgaacaccttagaaactggaatttcacatggaatatcatactgacgatactacttgtagtgcttcagtatggccattacaagtactctgtgttcttgtatggtgtcaagatggctattctatggatactttggcctcttgtgttggcactgtcactttttgacgcatgggctagcttccaggtcaactgggtctttttcgctttcagcatccttatggcttgcatcactcttatgctgtggataatgtattttgtcaatagcattcggttgtggcgcaggacacattcttggtggtctttcaatcctgaaactgacgcgcttctcactacttctgtgatgggccgacaggtctgcattccagtgcttggagcaccaactggtgtaacgctaacactccttagtggtacattgcttgtagagggctataaggttgctactggcgtacaggtaagtcaattacctaatttcgtcacagtcgccaaggccactacaacaattgtctacggacgtgttggtcgttcagtcaatgcttcatctggcactggttgggctttctatgtccggtcaaaacacggcgactattcagctgtgagtaatccgagtgcggttctcacagatagtgagaaagtgcttcatttagtctaaacagaaactttatggcttctgtcagctttcaggatcgtggccgcaaacgggtgccattatctctctatgcccctcttagggttactaatgacaagcccctttctaaggtacttgcaaacaacgctgtacccactaacaaggggaataaggaccagcaaattgggtactggaatgagcaaattcgctggcgcatgcgccgtggtgagcgaattgaacaaccttccaattggcatttctactacctcggaacaggacctcacggcgacctccgttataggactcgtactgagggtgttttctgggttgctaaagaaggcgcaaagactgaacccactaatttgggtgtcagaaaggcgtctgaaaagccaatcattccaaaattctctcaacagctccccagtgtagttgagattgttgaacctaacacacctcctgcttcacgtgcaaattcgcgtagcaggagtcgtggcaatggcaacaataggtctagatctccaagtaacaacagaggcaataaccagtcccgtggtaattcacagaatcgtggaaataaccagggtcgtggagcttctcagaacagaggaggcaataataataacaataacaagtctcgtaaccagtccaataacaggaaccagtcaaatgaccgtggtggtgtaacatcacgcgatgatctggtggctgctgtcaaggatgcacttaaatctttgggtattggagaaaatcctgacaggcataagcaacagcagaagcctaagcaggaaaagtctgacaacagcggcaaaaatacacctaagaagaacaaatccagggccacttcgaaggaacgtgacctcaaagacatcccagagtggaggagaattcccaagggcgaaaatagcgtagcagcttgcttcggacccagagggggcttcaaaaactttggagatgcggaatttgtcgaaaaaggtgttgatgcgtcaggctatgctcagatcgccagtttagcaccaaatgttgcagcattgctctttggtggtaatgtggctgttcgtgagctagcggactcttacgagattacatacaactataaaatgactgtgccaaagtcagatccaaatgttgagcttcttgtttcacaggtggatgcatttaaaactgggaatgcaaaactccagagaaagaaggaaaagaagaacaagcgtgaaaccacgctgcagcagcatgaagaggccatctacgatgatgtgggtgcgccatctgatgtgacccatgccaatctggaatgggacacagctgttgatggtggtgatacggccgttgaaattatcaacgagatcttcgatacaggaaattaaacaatgttagaccggcttatcctggctatgttccagggtagtgccattacactgttattactgagtgtttttctagcgacttggctgctgggctatggctttgccctctaaccagcggtcttggtcttgcacacaacggtaagccagtggtaatgtcagtgcaagaaggatattaccatagcactgtcacgaggggaacgcagtaccttttcatctaaacctttgcacgagtaattaaagatccgcttgacgagcctatatggaagagcgtgccaggtatttgacttaaggactgttagtaactgaagacctgacggtgttgatatggatacac

SEQ ID NO: 43 - DNA, 28033 bp, Coronavirus; identical to SEQ ID NO: 42

SEQ ID NO: 44 - DNA, 922 bp, Coronavirus
atttaataaatttggaaaagccaggctctattatgaagcattatcatttgaggagcaggatgaaatttacgcttatactaagcgcaatgtcctgccaacacttactcaaatgaatttgaaatatgctattagtgccaagaatagagcccgcactgttgctggtgtttccatacttagtactatgactggcagaatgtttcatcaaaaatgcttgaaaagtatagcagctacacgtggcgttcctgtggttataggcaccactaaattttatggcggctgggatgatatgttacgccgccttattaaagatgttgataatcctgtacttatgggttgggattatccaaagtgtgatcgtgctatgccaaacatactacgtattgttagtagtctggtattggcccgaaaacatgaggcatgttgttcgcaaagcgataggttttatcgactcgcgaatgaatgcgcacaagttcttagtgaaattgttatgtgtggtggctgttattatgttaagcctggtggcactagtagtggtgatgcaactactgcttttgctaattcagtctttaacatatgtcaagctgtttcagccaatgtatgtgccttaatgtcatgcaatggcaataagattgaagatttgagtatacgtgctcttcagaagcgcttatactcacatgtgtatagaaatgatatggttgattcaacctttgtcacagaatattatgaatttttaaataagcattttagtatgatgattttgagtgatgatggtgttgtgtgttatgattctgattatgcgtccaaagggtatattgctaatataagtgcttttcaacaggtattatattatcaaaataacgtttttatgtcagaatccaaatgttgggttgaaaatgacataaataaaggacctcatgaattc

SEQ ID NO: 45 - DNA, 922 bp, Coronavirus
atttaataaatttggaaaggccagactctactatgaagcattatcatttgaggagcaggacgaaatttatgcgtatactaaacgcaatgtcctgccgaccttaactcaaatgaatcttaaatatgctattagtgctaagaatagagcccgcactgttgctggtgtctccatccttagtactatgactggcagaatgtttcatcaaaagtgtttaaagagtatagcagctactcgtggtgtgcctgtagttataggcaccacgaagttttatggcggttgggatgacatgttacgccgccttattaaagatgttgatagtcctgtacttatgggttgggactatcctaagtgtgatcgtgctatgccaaacatactacgtattgttagtagtttggtgttagcccgtaaacatgattcgtgctgttcgcatacagatagattctatcgtcttgcgaacgagtgcgcccaagttttgagtgaaattgttatgtgtggtggttgttattatgttaaacctggtggcactagcagtggggatgcaaccactgcttttgctaattctgtttttaacatttgtcaagctgtttccgccaatgtatgctcgcttatggcatgcaatggacacaaaattgaagatttgagtatacgcgagttgcaaaagcgcctatactctaatgtgtatcgtgcggaccatgttgaccccgcatttgttagtgagtattatgagtttttaaataagcattttagtatgatgattttgagtgatgatggtgttgtgtgttataattcagagtttgcgtccaagggttatattgctaatataagtgcctttcaacaggtattatattatcaaaataatgtgtttatgtctgaggccaaatgttgggtcgaaacggacattgaaaagggaccgcatgaattt

SEQ ID NO: 46 - DNA, 28920 bp, Coronavirus
  misc_feature 7230-7329, 9929-10028, 10137-10236, 11646-11745, 20385-20484,21024-21123, 21753-21852, 22112-22211, 25301-25400: n = A,T,C or G
ttattaggtttttacctacccaggaaaagccaaccaacctcgatctcttgtagatctgttctctaaacgaactttaaaatctgtgtagctgtcgctcggctgcatgcctagtgcacctacgcagtataaacaataataaattttactgtcgttgacaagaaacgagtaactcgtccctcttctgcagactgcttacggtttcgtccgtgttgcagtcgatcatcagcatacctaggtttcgtccgggtgtgaccgaaaggtaagatggagagccttgttcttggtgtcaacgagaaaacacacgtccaactcagtttgcctgtccttcaggttagagacgtgctagtgcgtggcttcggggactctgtggaagaggccctatcggaggcacgtgaacacctcaaaaatggcacttgtggtctagtagagctggaaaaaggcgtactgccccagcttgaacagccctatgtgttcattaaacgttctgatgccttaagcaccaatcacggccacaaggtcgttgagctggttgcagaaatggacggcattcagtacggtcgtagcggtataacactgggagtactcgtgccacatgtgggcgaaaccccaattgcataccgcaatgttcttcttcgtaagaacggtaataagggagccggtggtcatagctatggcatcgatctaaagtcttatgacttaggtgacgagcttggcactgatcccattgaagattatgaacaaaactggaacactaagcatggcagtggtgcactccgtgaactcactcgtgagctcaatggaggtgcagtcactcgctatgtcgacaacaatttctgtggcccagatgggtaccctcttgattgcatcaaagattttctcgcacgcgcgggcaagtcaatgtgcactctttccgaacaacttgattacatcgagtcgaagagaggtgtctactgctgccgtgaccatgagcatgaaattgcctggttcactgagcgctctgataagagctacgagcaccagacacccttcgaaattaagagtgccaagaaatttgacactttcaaaggggaatgcccaaagtttgtgtttcctcttaactcaaaagtcaaagtcattcaaccacgtgttgaaaagaaaaagactgagggtttcatggggcgtatacgctctgtgtaccctgttgcatctccacaggagtgtaacaatatgcacttgtctaccttgatgaaatgtaatcattgcgatgaagtttcatggcagacgtgcgactttctgaaagccacttgtgaacattgtggcactgaaaatttagttattgaaggacctactacatgtgggtacctacctactaatgctgtagtgaaaatgccatgtcctgcctgtcaagacccagagattggacctgagcatagtgttgcagattatcacaaccactcaaacattgaaactcgactccgcaagggaggtaggactagatgttttggaggctgtgtgtttgcctatgttggctgctataataagcgtgcctactgggttcctcgtgctagtgctgatattggctcaggccatactggcattactggtgacaatgtggagaccttgaatgaggatctccttgagatactgagtcgtgaacgtgttaacattaacattgttggcgattttcatttgaatgaagaggttgccatcattttggcatctttctctgcttctacaagtgcctttattgacactataaagagtcttgattacaagtctttcaaaaccattgttgagtcctgcggtaactataaagttaccaagggaaagcccgtaaaaggtgcttggaacattggacaacagagatcagttttaacaccactgtgtggttttccctcacaggctgctggtgttatcagatcaatttttgcgcgcacacttgatgcagcaaaccactcaattcctgatttgcaaagagcagctgtcaccatacttgatggtatttctgaacagtcattacgtcttgtcgacgccatggtttatacttcagacctgctcaccaacagtgtcattattatggcatatgtaactggtggtcttgtacaacagacttctcagtggttgtctaatcttttgggcactactgttgaaaaactcaggcctatctttgaatggattgaggcgaaacttagtgcaggagttgaatttctcaaggatgcttgggagattctcaaatttctcattacaggtgtttttgacatcgtcaagggtcaaatacaggttgcttcagataacatcaaggattgtgtaaaatgcttcattgatgttgttaacaaggcactcgaaatgtgcattgatcaagtcactatcgctggcgcaaagttgcgatcactcaacttaggtgaagtcttcatcgctcaaagcaagggactttaccgtcagtgtatacgtggcaaggagcagctgcaactactcatgcctcttaaggcaccaaaagaagtaacctttcttgaaggtgattcacatgacacagtacttacctctgaggaggttgttctcaagaacggtgaactcgaagcactcgagacgcccgttgatagcttcacaaatggagctatcgttggcacaccagtctgtgtaaatggcctcatgctcttagagattaaggacaaagaacaatactgcgcattgtctcctggtttactggctacaaacaatgtctttcgcttaaaagggggtgcaccaattaaaggtgtaacctttggagaagatactgtttgggaagttcaaggttacaagaatgtgagaatcacatttgagcttgatgaacgtgttgacaaagtgcttaatgaaaagtgctctgtctacactgttgaatccggtaccgaagttactgagtttgcatgtgttgtagcagaggctgttgtgaagactttacaaccagtttctgatctccttaccaacatgggtattgatcttgatgagtggagtgtagctacattctacttatttgatgatgctggtgaagaaaacttttcatcacgtatgtattgttccttttaccctccagatgaggaagaagaggacgatgcagagtgtgaggaagaagaaattgatgaaacctgtgaacatgagtacggtacagaggatgattatcaaggtctccctctggaatttggtgcctcagctgaaacagttcgagttgaggaagaagaagaggaagactggctggatgatactactgagcaatcagagattgagccagaaccagaacctacacctgaagaaccagttaatcagtttactggttatttaaaacttactgacaatgttgccattaaatgtgttgacatcgttaaggaggcacaaagtgctaatcctatggtgattgtaaatgctgctaacatacacctgaaacatggtggtggtgtagcaggtgcactcaacaaggcaaccaatggtgccatgcaaaaggagagtgatgattacattaagctaaatggccctcttacagtaggagggtcttgtttgctttctggacataatcttgctaagaagtgtctgcatgttgttggacctaacctaaatgcaggtgaggacatccagcttcttaaggcagcatatgaaaatttcaattcacaggacatcttacttgcaccattgttgtcagcaggcatatttggtgctaaaccacttcagtctttacaagtgtgcgtgcagacggttcgtacacaggtttatattgcagtcaatgacaaagctctttatgagcaggttgtcatggattatcttgataacctgaagcctagagtggaagcacctaaacaagaggagccaccaaacacagaagattccaaaactgaggagaaatctgtcgtacagaagcctgtcgatgtgaagccaaaaattaaggcctgcattgatgaggttaccacaacactggaagaaactaagtttcttaccaataagttactcttgtttgctgatatcaatggtaagctttaccatgattctcagaacatgcttagaggtgaagatatgtctttccttgagaaggatgcaccttacatggtaggtgatgttatcactagtggtgatatcacttgtgttgtaataccctccaaaaaggctggtggcactactgagatgctctcaagagctttgaagaaagtgccagttgatgagtatataaccacgtaccctggacaaggatgtgctggttatacacttgaggaagctaagactgctcttaagaaatgcaaatctgcattttatgtactaccttcagaagcacctaatgctaaggaagagattctaggaactgtatcctggaatttgagagaaatgcttgctcatgctgaagagacaagaaaattaatgcctatatgcatggatgttagagccataatggcaaccatccaacgtaagtataaaggaattaaaattcaagagggcatcgttgactatggtgtccgattcttcttttatactagtaaagagcctgtagcttctattattacgaagctgaactctctaaatgagccgcttgtcacaatgccaattggttatgtgacacatggttttaatcttgaagaggctgcgcgctgtatgcgttctcttaaagctcctgccgtagtgtcagtatcatcaccagatgctgttactacatataatggatacctcacttcgtcatcaaagacatctgaggagcactttgtagaaacagtttctttggctggctcttacagagattggtcctattcaggacagcgtacagagttaggtgttgaatttcttaagcgtggtgacaaaattgtgtaccacactctggagagccccgtcgagtttcatcttgacggtgaggttctttcacttgacaaactaaagagtctcttatccctgcgggaggttaagactataaaagtgttcacaactgtggacaacactaatctccacacacagcttgtggatatgtctatgacatatggacagcagtttggtccaacatacttggatggtgctgatgttacaaaaattaaacctcatgtaaatcatgagggtaagactttctttgtactacctagtgatgacacactacgtagtgaagctttcgagtactaccatactcttgatgagagttttcttggtaggtacatgtctgctttaaaccacacaaagaaatggaaatttcctcaagttggtggtttaacttcaattaaatgggctgataacaattgttatttgtctagtgttttattagcacttcaacagcttgaagtcaaattcaatgcaccagcacttcaagaggcttattatagagcccgtgctggtgatgctgctaacttttgtgcactcatactcgcttacagtaataaaactgttggcgagcttggtgatgtcagagaaactatgacccatcttctacagcatgctaatttggaatctgcaaagcgagttcttaatgtggtgtgtaaacattgtggtcagaaaactactaccttaacgggtgtagaagctgtgatgtatatgggtactctatcttatgataatcttaagacaggtgtttccattccatgtgtgtgtggtcgtgatgctacacaatatctagtacaacaagagtcttcttttgttatgatgtctgcaccacctgctgagtataaattacagcaggtacattcttatgtgcgaatgagtacactggtaactatcagtgtggtcattacactcatataactgctaaggagaccctctatcgtattgacggagctcaccttacaaagatgtcagagtacaaaggaccagtgactgatgttttctacaaggaaacatcttacactacaaccatcaagcctgtgtcgtataaactcgatggagttacttacacagagattgaaccaaaattggatgggtattataaaaaggataatgcttactatacagagcagcctatagaccttgtaccaactcaaccattaccaaatgcgagttttgataatttcaaactcacatgttctaacacaaaatttgctgatgatttaaatcaaatgacaggcttcacaaagccagcttcacgagagctatctgtcacattcttcccagacttgaatggcgatgtagtggctattgactatagacactattcagcgagtttcaagaaaggtgctaaattactgcataagccaattgtttggcacattaaccaggctacaaccaagacaacgttcaaaccaaacacttggtgtttacgttgtctttggagtacaaagccagtagatacttcaaattcatttgaagttctggcagtagaagacacacaaggaatggacaatcttgcttgtgaaagtcaacaacccacctctgaagaagtagtggaaaatcctaccatacagaaggaagtcatagagtgtgacgtgaaaactaccgaagttgtaggcaatgtcatacttaaaccatcagatgaaggtgttaaagtaacacaagagttaggtcatgaggatcttatggctgcttatgtggaaaacacaagcattaccattaagaaacctaatgagctttcactagccttaggtttaaaaacaattgccactcatggtattgctgcaattaatagtgttccttggagtaaaattttggcttatgtcaaaccattcttaggacaagcagcaattacaacatcaaattgcgctaagagattagcacaacgtgtgtttaacaattatatgccttatgtgtttacattattgttccaattgtgtacttttactaaaagtaccaattctagaattagagcttcactacctacaactattgctaaaaatagtgttaagagtgttgctaaattatgtttggatgccggcattaattatgtgaagtcacccaaattttctaaattgttcacaatcgctatgtggctattgttgttaagtatttgcttaggttctctaatctgtgtaactgctgcttttggtgtactcttatctaattttggtgctccttcttattgtaatggcgttagagaattgtatcttaattcgtctaacgttactactatggatttctgtgaaggttcttttccttgcagcatttgtttaagtggattagactcccttgattcttatccagctcttgaaaccattcaggtgacgatttcatcgtacaagctagacttgacaattttaggtctggccgctgagtgggttttggcatatatgttgttcacaaaattcttttatttattaggtctttcagctnnnnnnnnnnnnnnnnnnnnnnnnnnnnnnnnnnnnnnnnnnnnnnnnnnnnnnnnnnnnnnnnnnnnnnnnnnnnnnnnnnnnnnnnnnnnnnnnnnnncaaatggcacccgtttctgcaatggttaggatgtacatcttctttgcttctttctactacatatggaagagctatgttcatatcatggatggttgcacctcttcgacttgcatgatgtgctataagcgcaatcgtgccacacgcgttgagtgtacaactattgttaatggcatgaagagatctttctatgtctatgcaaatggaggccgtggcttctgcaagactcacaattggaattgtctcaattgtgacacattttgcactggtagtacattcattagtgatgaagttgctcgtgatttgtcactccagtttaaaagaccaatcaaccctactgaccagtcatcgtatattgttgatagtgttgctgtgaaaaatggcgcgcttcacctctactttgacaaggctggtcaaaagacctatgagagacatccgctctcccattttgtcaatttagacaatttgagagctaacaacactaaaggttcactgcctattaatgtcatagtttttgatggcaagtccaaatgcgacgagtctgcttctaagtctgcttctgtgtactacagtcagctgatgtgccaacctattctgttgcttgaccaagctcttgtatcagacgttggagatagtactgaagtttccgttaagatgtttgatgcttatgtcgacaccttttcagcaacttttagtgttcctatggaaaaacttaaggcacttgttgctacagctcacagcgagttagcaaagggtgtagctttagatggtgtcctttctacattcgtgtcagctgcccgacaaggtgttgttgataccgatgttgacacaaaggatgttattgaatgtctcaaactttcacatcactctgacttagaagtgacaggtgacagttgtaacaatttcatgctcacctataataaggttgaaaacatgacgcccagagatcttggcgcatgtattgactgtaatgcaaggcatatcaatgcccaagtagcaaaaagtcacaatgtttcactcatctggaatgtaaaagactacatgtctttatctgaacagctgcgtaaacaaattcgtagtgctgccaagaagaacaacataccttttagactaacttgtgctacaactagacaggttgtcaatgtcataactactaaaatctcactcaagggtggtaagattgttagtacttgttttaaacttatgcttaaggccacattattgtgcgttcttgctgcattggtttgttatatcgttatgccagtacatacattgtcaatccatgatggttacacaaatgaaatcattggttacaaagccattcaggatggtgtcactcgtgacatcatttctactgatgattgttttgcaaataaacatgctggttttgacgcatggtttagccagcgtggtggttcatacaaaaatgacaaaagctgccctgtagtagctgctatcattacaagagagattggtttcatagtgcctggcttaccgggtactgtgctgagagcaatcaatggtgacttcttgcattttctacctcgtgtttttagtgctgttggcaacatttgctacacaccttccaaactcattgagtatagtgattttgctacctctgcttgcgttcttgctgctgagtgtacaatttttaaggatgctatgggcaaacctgtgccatattgttatgacactaatttgctagagggttctatttcttatagtgagcttcgtccagacactcgttatgtgcttatggatggttccatcatacagtttcctaacacttacctggagggttctgttagagtagtaacaacttttgatgctgagtactgtagacatggtacatgcgaaaggtcagaagtaggtatttgcctatctaccagtggtagatgggttcttaataatgagcattacagagctctatcaggagttttctgtggtgttgatgcgatgaatctcatagctaacatctttactcctcttgtgcaacctgtgggtgctttagatgtgtctgcttcagtagtggctggtggtattattgccatattggtgacttgtgctgcctactactttatgaaattcagacgtgcttttggtgagtacaaccatgttgttgctgctaatgcacttttgtttttgatgtctttcactatactctgtctggtaccagcttacagctttctgccgggagtctactcagtcttttacttgtacttgacattctatttcaccaatgatgtttcattcttggctcaccttcaatggtttgccatgttttctcctattgtgcctttttggataacagcaatctatgtattctgtatttctctgaagcactgccattggttctttaacaactatcttaggaaaagagtcatgtttaatggagttacatttagtaccttcgaggaggctgctttgtgtacctttttgctcaacaaggaaatgtacctaaaattgcgtagcgagacactgttgccacttacacagtataacaggtatcttgctctatataacaagtacaagtatttcagtggagtcttagatactaccagctatcgtgaagcagcttgctgccacttagcaaaggctctaannnnnnnnnnnnnnnnnnnnnnnnnnnnnnnnnnnnnnnnnnnnnnnnnnnnnnnnnnnnnnnnnnnnnnnnnnnnnnnnnnnnnnnnnnnnnnnnnnnntggcattcccgtcaggcaaagttgaagggtgcatggtacaagtaacctgtggaactacaactcttaatggattgtggttggatgacacagtatactgtccaagacatgtnnnnnnnnnnnnnnnnnnnnnnnnnnnnnnnnnnnnnnnnnnnnnnnnnnnnnnnnnnnnnnnnnnnnnnnnnnnnnnnnnnnnnnnnnnnnnnnnnnnnccattctatgcaaaattgtctgcttaggcttaaagttgatacttctaaccctaagacacccaagtataaatttgtccgtatccaacctggtcaaacattttcagttctagcatgctacaatggttcaccatctggtgtttatcagtgtgccatgagacctaatcataccattaaaggttctttccttaatggatcatgtggtagtgttggttttaacattgattatgattgcgtgtctttctgctatatgcatcatatggagcttccaacaggagtacacgctggtactgacttagaaggtaaattctatggtccatttgttgacagacaaactgcacaggctgcaggtacagacacaaccataacattaaatgttttggcatggctgtatgctgctgttatcaatggtgataggtggtttcttaatagattcaccactactttgaatgactttaaccttgtggcaatgaagtacaactatgaacctttgacacaagatcatgttgacatattgggacctctttctgctcaaacaggaattgccgtcttagatatgtgtgctgctttgaaagagctgctgcagaatggtatgaatggtcgtactatccttggtagcactattttagaagatgagtttacaccatttgatgttgttagacaatgctctggtgttaccttccaaggtaagttcaagaaaattgttaagggcactcatcattggatgcttttaactttcttgacatcactattgattcttgttcaaagtacacagtggtcactgtttttctttgtttacgagaatgctttcttgccatttactcttggtattatggcaattgctgcatgtgctatgctgcttgttaagcataagcacgcattcttgtgcttgtttctgttaccttctcttgcaacagttgcttactttaatatggtctacatgcctgctagctgggtgatgcgtatcatgacatggcttgaattggctgacactagcttgtctggttataggcttaaggattgtgttatgtatgcttcagctttagttttgcttattctcatgacagctcgcactgtttatgatgatgctgctagacgtgtttggacactgatgaatgtcattacacttgtttacaaagtctactatggtaatgctttagatcaagctatttccatgtgggccttagttatttctgtaacctctaactattctggtgtcgttacgactatcatgtttttagctagagctatagtgtttgtgtgtgttgagtattacccattgttatttattactggcaacaccttacagtgtatcatgcttgtttattgtttcttaggctattgttgctgctgctactttggccttttctgtttactcaaccgttacttcaggcttactcttggtgtttatgnnnnnnnnnnnnnnnnnnnnnnnnnnnnnnnnnnnnnnnnnnnnnnnnnnnnnnnnnnnnnnnnnnnnnnnnnnnnnnnnnnnnnnnnnnnnnnnnnnnnaggctattgcttcagaatttagttctttaccatcatatgccgcttatgccactgcccaggaggcctatgagcaggctgtagctaatggtgattctgaagtcgttctcaaaaagttaaagaaatctttgaatgtggctaaatctgagtttgaccgtgatgctgccatgcaacgcaagttggaaaagatggcagatcaggctatgacccaaatgtacaaacaggcaagatctgaggacaagagggcaaaagtaactagtgctatgcaaacaatgctcttcactatgcttaggaagcttgataatgatgcacttaacaacattatcaacaatgcgcgtgatggttgtgttccactcaacatcataccattgactacagcagccaaactcatggttgttgtccctgattatggtacctacaagaacacttgtgatggtaacacctttacatatgcatctgcactctgggaaatccagcaagttgttgatgcggatagcaagattgttcaacttagtgaaattaacatggacaattcaccaaatttggcttggcctcttattgttacagctctaagagccaactcagctgttaaactacagaataatgaactgagtccagtagcactacgacagatgtcctgtgcggctggtaccacacaaacagcttgtactgatgacaatgcacttgcctactataacaattcgaagggaggtaggtttgtgctggcattactatcagaccaccaagatctcaaatgggctagattccctaagagtgatggtacaggtacaatttacacagaactggaaccaccttgtaggtttgttacagacacaccaaaagggcctaaagtgaaatacttgtacttcatcaaaggcttaaacaacctaaatagaggtatggtgctgggcagtttagctgctacagtacgtcttcaggctggaaatgctacagaagtacctgccaattcaactgtgctttccttctgtgcttttgcagtagaccctgctaaagcatataaggattacctagcaagtggaggacaaccaatcaccaactgtgtgaagatgttgtgtacacacactggtacaggacaggcaattactgtaacaccagaagctaacatggaccaagagtcctttggtggtgcttcatgttgtctgtattgtagatgccacattgaccatccaaatcctaaaggattctgtgacttgaaaggtaagtacgtccaaatacctaccacttgtgctaatgacccagtgggttttacacttagaaacacagtctgtaccgtctgcggaatgtggaaaggttatggctgtagttgtgaccaactccgcgaacccttgatgcagtctgcggatgcatcaacgtttttaaacgggtttgcggtgtaagtgcagcccgtcttacaccgtgcggcacaggcactagtactgatgtcgtctacagggcttttgatatttacaacgaaaaagttgctggttttgcaaagttcctaaaaactaattgctgtcgcttccaggagaaggatgaggaaggcaatttattagactcttactttgtagttaagaggcatactatgtctaactaccaacatgaagagactatttataacttggttaaagattgtccagcggttgctgtccatgactttttcaagtttagagtagatggtgacatggtaccacatatatcacgtcagcgtctaactaaatacacaatggctgatttagtctatgctctacgtcattttgatgagggtaattgtgatacattaaaagaaatactcgtcacatacaattgctgtgatgatgattatttcaataagaaggattggtatgacttcgtagagaatcctgacatcttacgcgtatatgctaacttaggtgagcgtgtacgccaatcattattaaagactgtacaattctgcgatgctatgcgtgatgcaggcattgtaggcgtactgacattagataatcaggatcttaatgggaactggtacgatttcggtgatttcgtacaagtagcaccaggctgcggagttcctattgtggattcatattactcattgctgatgcccatcctcactttgactagggcattggctgctgagtcccatatggatgctgatctcgcaaaaccacttattaagtgggatttgctgaaatatgattttacggaagagagactttgtctcttcgaccgttattttaaatattgggaccagacataccatcccaattgtattaactgtttggatgataggtgtatccttcattgtgcaaactttaatgtgttattttctactgtgtttccacctacaagttttggaccactagtaagaaaaatatttgtagatggtgttccttttgttgtttcaactggataccattttcgtgagttaggagtcgtacataatcaggatgtaaacttacatagctcgcgtctcagtttcaaggaacttttagtgtatgctgctgatccagctatgcatgcagcttctggcaatttattgctagataaacgcactacatgcttttcagtagctgcactaacaaacaatgttgcttttcaaactgtcaaacccggtaattttaataaagacttttatgactttgctgtgtctaaaggtttctttaaggaaggaagttctgttgaactaaaacacttcttctttgctcaggatggcaacgctgctatcagtgattatgactattatcgttataatctgccaacaatgtgtgatatcagacaactcctattcgtagttgaagttgttgataaatactttgattgttacgatggtggctgtattaatgccaaccaagtaatcgttaacaatctggataaatcagctggtttcccatttaataaatggggtaaggctagactttattatgactcaatgagttatgaggatcaagatgcacttttcgcgtatactaagcgtaatgtcatccctactataactcaaatgaatcttaagtatgccattagtgcaaagaatagagctcgcaccgtagctggtgtctctatctgtagtactatgacaaatagacagtttcatcagaaattattgaagtcaatagccgccactagaggagctactgtggtaattggaacaagcaagttttacggtggctggcataatatgttaaaaactgtttacagtgatgtagaaactccacaccttatgggttgggattatccaaaatgtgacagagccatgcctaacatgcttaggataatggcctctcttgttcttgctcgcaaacataacacttgctgtaacttatcacaccgtttctacaggttagctaacgagtgtgcgcaagtattaagtgagatggtcatgtgtggcggctcactatatgttaaaccaggtggaacatcatccggtgatgctacaactgcttatgctaatagtgtctttaacatttgtcaagctgttacagccaatgtaaatgcacttctttcaactgatggtaataagatagctgacaagtatgtccgcaatctacaacacaggctctatgagtgtctctatagaaatagggatgttgatcatgaattcgtggatgagttttacgcttacctgcgtaaacatttctccatgatgattctttctgatgatgccgttgtgtgctataacagtaactatgcggctcaaggtttagtagctagcattaagaactttaaggcagttctttattatcaaaataatgtgttcatgtctgaggcaaaatgttggactgagactgaccttactaaaggacctcacgaattttgctcacagcatacaatgctagttaaacaaggagatgattacgtgtacctgccttacccagatccatcaagaatattaggcgcaggctgttttgtcgatgatattgtcaaaacagatggtacacttatgattgaaaggttcgtgtcactggctattgatgcttacccacttacaaaacatcctaatcaggagtatgctgatgtctttcacttgtatttacaatacattagaaagttacatgatgagcttactggccacatgttggacatgtattccgtaatgctaactaatgataacacctcacggtactgggaacctgagttttatgaggctatgtacacaccacatacagtcttgcaggctgtaggtgcttgtgtattgtgcaattcacagacttcacttcgttgcggtgcctgtattaggagaccattcctatgttgcaagtgctgctatgaccatgtcatttcaacatcacacaaattagtgttgtctgttaatccctatgtttgcaatgccccaggttgtgatgtcactgatgtgacacaactgtatctaggaggtatgagctattattgcaagtcacataagcctcccattagttttccattatgtgctaatggtcaggtttttggtttatacaaaaacacatgtgtaggcagtgacaatgtcactgacttcaatgcgatagcaacatgtgattggactaatgctggcgattacatacttgccaacacttgtactgagagactcaagcttttcgcagcagaaacgctcaaagccactgaggaaacatttaagctgtcatatggtattgccactgtacgcgaagtactctctgacagagaattgcatctttcatgggaggttggaaaacctagaccaccattgaacagaaactatgtctttactggttaccgtgtaactaaaaatagtaaagtacagattggagagtacacctttgaaaaaggtgactatggtgatgctgttgtgtacagaggtactacgacatacaagttgaatgttggtgattactttgtgttgacatctcacactgtaatgccacttagtgcacctactctagtgccacaagagcactatgtgagaattactggcttgtacccaacactcaacatctcagatgagttttctagcaatgttgcaaattatcaaaaggtcggcatgcaaaagtactctacactccaaggaccacctggtactggtaagagtcattttgccatcggacttgctctctattacccatctgctcgcatagtgtatacggcatgctctcatgcagctgttgatgccctatgtgaaaaggcattaaaatatttgcccatagataaatgtagtagaatcatacctgcgcgtgcgcgcgtagagtgttttgataaattcaaagtgaattcaacactagaacagtatgttttctgcactgtaaatgcattgccagaaacaactgctgacattgtagtctttgatgaaatctctatggctactaattatgacttgagtgttgtcaatgctagacttcgtgcaaaacactacgtctatattggcgatcctgctcaattaccagccccccgcacattgctgactaaaggcacactagaaccagaatattttaattcagtgtgcagacttatgaaaacaataggtccagacatgttccttggaacttgtcgccgttgtcctgctgaaattgttgacactgtgagtgctttagtttatgacaataagctaaaagcacacaaggagaagtcagctcaatgcttcaaaatgttctacaaaggtgttattacacatgatgtttcatctgcaatcaacagacctcaaataggcgttgtaagagaatttcttacacgcaatcctgcttggagaaaagctgtttttatctcaccttataattcacagaacgctgtagcttcaaaaatcttaggattgcctacgcagactgttgattcatcacagggttctgaatatgactatgtcatattcacacaaactactgaaacagcacactcttgtaatgtcaaccgcttcaatgtggctatcacaagggcaaaaattggcattttgtgcataatgtctgatagagatctttatgacaaactgcaatttacaagtctagaaataccacgtcgcaatgtggctacattacaagcagaaaatgtaactggactttttaaggactgtagtaagatcattactggtcttcatcctacacaggcacctacacacctcagcgttgatataaagttcaagactgaaggattatgtgttgacataccaggcataccaaaggacatgacctaccgtagactcatctctatgatgggtttcaaaatgaattaccaagtcaatggttaccctaatatgtttatcacccgcgaagaagctattcgtcacgttcgtgcgtggattggctttgatgtagagggctgtcatgcaactagagatgctgtgggtactaacctacctctccagctaggattttctacaggtgttaacttagtagctgtaccgactggttatgttgacactgaaaataacacagaattcaccagagttaatgcaaaacctccaccaggtgaccagtttaaacatcttataccactcatgtataaaggcttgccctggaatgtagtgcgtattaagatagtacaaatgctcagtgatacactgaaaggattgtcagacagagtcgtgttcgtcctttgggcgcatggctttgagcttacatcaatgaagtactttgtcaagattggacctgaaagaacgtgttgtctgtgtgacaaacgtgcaacttgcttttctacttcatcagatacttatgcctgctggaatcattctgtgggttttgactatgtctataacccatttatgattgatgttcagcagtggggctttacgggtaaccttcagagtaaccatgaccaacattgccaggtacatggaaatgcacatgtggctagttgtgatgctatcatgactagatgtttagcagtccatgagtgctttgttaagcgcgttgattggtctgttgaataccctattataggagatgaactgagggttaattctgcttgcagaaaagtacaacacatggttgtgaagtctgcattgcttgctgataagtttccagttcttcatgacattggaaatccaaaggctatcaagtgtgtgcctcaggctgaagtagaatggaagttctacgatgctcagccatgtagtgacaaagcttacaaaatagaggaactcttctattcttatgctacacatcacgataaattcactgatggtgtttgtttgttttggaattgtaacgttgatcgttacccagccaatgcaattgtgtgtaggtttgacacaagagtcttgtcaaacttgaacttaccaggctgtgatggtggtagtttgtatgtgaataagcatgcattccacactccagctttcgataaaagtgcatttactaatttaaagcaattgcctttcttttactattctgatagtccttgtgagtctcatggcaaacaagtagtgtcggatattgattatgttccactcaaatctgctacgtgtattacacgatgcaatttaggtggtgctgtttgcagacaccatgcaaatgagtaccgacagtacttggatgcatataatatgatgatttctgctggatttagcctatggatttacaaacaatttgatacttataacctgtggaatacatttaccaggttacagagtttagaaaatgtggcttataatgttgttaataaaggacactttgatggacacgccggcgaagcacctgtttccatcattaataatgctgtttacacaaaggtagatggtattgatgtggagatctttgaaaataagacaacacttcctgttaatgttgcatttgagctttgggctaagcgtaacattaaaccagtgccagagattaagatactcaataatttgggtgttgatatcgctgctaatactgtaatctgggactacaaaagagaagccccagcacatgtgtctacaataggtgtctgcacaatgactgacattgccaagaaacctactgagagtgcttgttcttcacttactgtcttgtttgatggtagagtggaaggacaggtagacctttttagaaacgcccgtaatggtgttttaataacagaaggttcagtcaaaggtctaacaccttcaaagggaccagcacaagctagcgtcaatggagtcacattaattggagaatcagtaaaaacacagtttaactactttaagaaagtagacggcattattcaacagttgcctgaaacctactttactcagagcagagacttagaggattttaagcccagatcacaaatggaaactgactttctcgagctcgctatggatgaattcatacagcgatataagctcgagggctatgccttcgaacacatcgtttatggagatttcagtcatggacaacttggcggtcttcatttaatgataggcttagccaagcgctcacaagattcaccacttaaattagaggattttatccctatggacagcacagtgaaaaattacttcataacagatgcgcaaacaggttcatcaaaatgtgtgtgttctgtgattgatcttttacttgatgactttgtcgagataataaagtcacaagatttgtcagtgatttcaaaagtggtcaaggttacaattgactatgctgaaatttcattcatgctttggtgtaaggatggacatgttgaaaccttctacccaaaactacaagcaagtcaagcgtggcaaccaggtgttgcgatgcctaacttgtacaagatgcaaagaatgcttcttgaaannnnnnnnnnnnnnnnnnnnnnnnnnnnnnnnnnnnnnnnnnnnnnnnnnnnnnnnnnnnnnnnnnnnnnnnnnnnnnnnnnnnnnnnnnnnnnnnnnnngtacagctgtgctcagacaatggttgccaactggcacactacttgtcgattcagatcttaatgacttcgtctccgacgcagattctactttaattggagactgtgcaacagtacatacggctaataaatgggaccttattattagcgatatgtatgaccctaggaccaaacatgtgacaaaagagaatgactctaaagaagggtttttcacttatctgtgtggatttataaagcaaaaactagccctgggtggttctatagctgtaaagataacagagcattcttggaatgctgacctttacaagcttatgggccatttctcatggtggacagcttttgttacaaatgtaaatgcatcatcatcggaagcatttttaattggggctaactatcttggcaagccgaaggaacaaattgatggctataccatgcatgctaactacattttctggaggaacacaaatcctatccagttgtcttcctattcactctttgacatgagcaaatttcctcttaaattaagaggaactgctgtaatgnnnnnnnnnnnnnnnnnnnnnnnnnnnnnnnnnnnnnnnnnnnnnnnnnnnnnnnnnnnnnnnnnnnnnnnnnnnnnnnnnnnnnnnnnnnnnnnnnnnnatgaacaacaagtcacagtcggtgattattattaacaattctactaatgttgttatacgagcatgtaactttgaattgtgtgacaaccctttctttgctgtttctaaacccatgggtacacagacacatactatgatattcgataatgcatttaattgcactttcgagtacatatctgatgccttttcgcttgatgtttcagaaaagtcaggtaattttaaacacttacgagagtttgtgtttaaaaataaagatgggtttctctatgtttataagggctatcaacctatagatgtagttcgtgatctaccttctggttttaacactttgaaacctatttttaagttgcctcttggtattaacattacaaattttagagccattcttacagccttttcacctgctcaagacacttggggcacgtcagctgcagcctattttgttggctatttaaagccaactacatttatgctcaagtatgatgaaaatggtacaatcacagatgctgttgattgttctcaaaatccacttgctgaactcaaatgctctgttaagagctttgagattgacaaaggaatttaccagacctctaatttcagggttgttccctcaggagatgttgtgagattnnnnnnnnnnnnnnnnnnnnnnnnnnnnnnnnnnnnnnnnnnnnnnnnnnnnnnnnnnnnnnnnnnnnnnnnnnnnnnnnnnnnnnnnnnnnnnnnnnnnattcccttctgtctatgcatgggagagaaaaaaaatttctaattgtgttgctgattactctgtgctctacaactcaacatttttttcaacctttaagtgctatggcgtttctgccactaagttgaatgatctttgcttctccaatgtctatgcagattcttttgtagtcaagggagatgatgtaagacaaatagcgccaggacaaactggtgttattgctgattataattataaattgccagatgatttcatgggttgtnnnnnnnnnnnnnnnnnnnnnnnnnnnnnnnnnnnnnnnnnnnnnnnnnnnnnnnnnnnnnnnnnnnnnnnnnnnnnnnnnnnnnnnnnnnnnnnnnnnnttacaccactactggcattggctaccaaccttacagagttgtagtactttcttttgaacttttaaatgcaccggccacggtttgtggaccaaaattatccactgaccttattaagaaccagtgtgtcaattttaattttaatggactcactggtactggtgtgttaactccttcttcaaagagatttcaaccatttcaacaatttggccgtgatgtttctgatttcactgattccgttcgagatcctaaaacatctgaaatattagacatttcaccttgctcttttgggggtgtaagtgtaattacacctggaacaaatgcttcatctgaagttgctgttctatatcaagatgttaactgcactgatgtttctacagcaattcatgcagatcaactcacaccagcttggcgcatatattctactggaaacaatgtattccagactcaagcaggctgtcttataggagctgagcatgtcgacacttcttatgagtgcgacattcctattggagctggcatttgtgctagttaccatacagtttctttattacgtagtactagccaaaaatctattgtggcttatactatgtctttaggtgctgatagttcaattgcttactctaataacaccattgctatacctactaacttttcaattagcattactacagaagtaatgcctgtttctatggctaaaacctccgtagattgtaatatgtacatctgcggagattctactgaatgtgctaatttgcttctccaatatggtagcttttgcacacaactaaatcgtgcactctcaggtattgctgctgaacaggatcgcaacacacgtgaagtgttcgctcaagtcaaacaaatgtacaaaaccccaactttgaaatattttggtggttttaatttttcacaaatattacctgaccctctaaagccaactaagaggtcttttattgaggacttgctctttaataaggtgacactcgctgatgctggcttcatgaagcaatatggcgaatgcctaggtgatattaatgctagagatctcatttgtgcgcagaagttcaatggacttacagtgttgccacctctgctcactgatgatatgattgctgcctacactgctgctctagttagtggtactgccactgctggatggacatttggtgctggcgctgctcttcaaataccttttgctatgcaaatggcatataggttcaatggcattggagttacccaaaatgttctctatgagaaccaaaaacaaatcgccaaccaatttaacaaggcgattagtcaaattcaagaatcacttacaacaacatcaactgcattgggcaagctgcaagacgttgttaaccagaatgctcaagcattaaacacacttgttaaacaacttagctctaattttggtgcaatttcaagtgtgctaaatgatatcctttcgcgacttgataaagtcgaggcggaggtacaaattgacaggttaattacaggcagacttcaaagccttcaaacctatgtaacacaacaactaatcagggctgctgaaatcagggcttctgctaatcttgctgctactaaaatgtctgagtgtgttcttggacaatcaaaaagagttgacttttgtggaaagggctaccaccttatgtccttcccacaagcagccccgcatggtgttgtcttcctacatgtcacgtatgtgccatcccaggagaggaacttcaccacagcgccagcaatttgtcatgaaggcaaagcatacttccctcgtgaaggtgtttttgtgtttaatggcacttcttggtttattacacagaggaacttcttttctccacaaataattactacagacaatacatttgtctcaggaaattgtgatgtcgttattggcatcattaacaacacagtttatgatcctctgcaacctgagcttgactcattcaaagaagagctggacaagtacttcaaaaatcatacatcaccagatgttgatcttggcgacatttcaggcattaacgcttctgtcgtcaacattcaaaaagaaattgaccgcctcaatgaggtcgctaaaaatttaaatgaatcactcattgaccttcaagaattgggaaaatatgagcaatatattaaatggccttggtatgtttggctcggcttcattgctggactaattgccatcgtcatggttacaatcttgctttgttgcatgactagttgttgcagttgcctcaagggtgcatgctcttgtggttcttgctgcaagtttgatgaggatgactctgagccagttctcaagggtgtcaaattacattacacataaacgaacttatggatttgtttatgagattttttactcttggatcaattactgcacagccagtaaaaattgacaatgcttctcctgcaagtactgttcatgctacagcaacgataccgctacaagcctcactccctttcggatggcttgttattggcgttgcatttcttgctgtttttcagagcgctaccaaaataattgcgctcaataaaagatggcagctagccctttataagggcttccagttcatttgcaatttactgctgctatttgttaccatctattcacatcttttgcttgtcgctgcaggtatggaggcgcaatttttgtacctctatgccttgatatattttctacaatgcatcaacgcatgtagaattattatgagatgttggctttgttggaagtgcaaatccaagaacccattactttatgatgccaactactttgtttgctggcacacacataactatgactactgtataccatataacagtgtcacagatacaattgtcgttactgaaggtgacggcatttcaacaccaaaactcaaagaagactaccaaattggtggttattctgaggataggcactcaggtgttaaagactatgtcgttgtacatggctatttcaccgaagtttactaccagcttgagtctacacaaattactacagacactggtattgaaaatgctacattcttcatctttaacaagcttgttaaagacccaccgaatgtgcaaatacacacaatcgacggctcttcaggagtnnnnnnnnnnnnnnnnnnnnnnnnnnnnnnnnnnnnnnnnnnnnnnnnnnnnnnnnnnnnnnnnnnnnnnnnnnnnnnnnnnnnnnnnnnnnnnnnnnnnaacaggtacgttaatagttaatagcgtacttctttttcttgctttcgtggtattcttgctagtcacactagccatccttactgcgcttcgattgtgtgcgtactgctgcaatattgttaacgtgagtttagtaaaaccaacggtttacgtctactcgcgtgttaaaaatctgaactcttctgaaggagttcctgatcttctggtctaaacgaactaactattattattattctgtttggaactttaacattgcttatcatggcagacaacggtactattaccgttgaggagcttaaacaactcctggaacaatggaacctagtaataggtttcctattcctagcctggattatgttactacaatttgcctattctaatcggaacaggtttttgtacataataaagcttgttttcctctggctcttgtggccagtaacacttgcttgttttgtgcttgctgctgtctacagaattaattgggtgactggcgggattgcgattgcaatggcttgtattgtaggcttgatgtggcttagctacttcgttgcttccttcaggctgtttgctcgtacccgctcaatgtggtcattcaacccagaaacaaacattcttctcaatgtgcctctccgggggacaattgtgaccagaccgctcatggaaagtgaacttgtcattggtgctgtgatcattcgtggtcacttgcgaatggccggacactccctagggcgctgtgacattaaggacctgccaaaagagatcactgtggctacatcacgaacgctttcttattacaaattaggagcgtcgcagcgtgtaggcactgattcaggttttgctgcatacaaccgctaccgtattggaaactataaattaaatacagaccacgccggtagcaacgacaatattgctttgctagtacagtaagtgacaacagatgtttcatcttgttgacttccaggttacaatagcagagatattgattatcattatgaggactttcaggattgctatttggaatcttgacgttataataagttcaatagtgagacaattatttaagcctctaactaagaagaattattcggagttagatgatgaagaacttatggagttagattatccataaaacgaacatgaaaattattctcttcctgacattgattgtatttacatcttgcgagctatatcactatcaggagtgtgttagaggtacgactgtactactaaaagaaccttgcccatcaggaacatacgagggcaattcaccatttcaccctcttgctgacaataaatttgcactaacttgcactagcacacactttgcttttgcttgtgctgacggtactcgacatacctatcagctgcgtgcaagatcagtttcaccaaaacttttcatcagacaagaggaggttcaacaagagctctactcgccactttttctcattgttgctgctctagtatttttaatactttgcttcaccattaagagaaagacagaatgaatgagctcactttaattgacttctatttgtgctttttagcctttctgctattccttgttttaataatgcttattatattttggttttcactcgaaatccaggatctagaagaaccttgtaccaaagtctaaacgaacatgaaacttctcattgttttgacttgtatttctctatgcagttgcatacgcactgtagtacagcgctgtgcatctaataaacctcatgtgcttgaagatccttgtaaggtacaacactaggggtaatacttatagcactgcttggctttgtgctctaggaaaggttttaccttttcatagatggcacactatggttcaaacatgcacacctaatgttactatcaactgtcaagatccagctggtggtgcgcttatagctaggtgttggtaccttcatgaaggtcaccaaactgctgcatttagagacgtacttgttgttttaaataaacgaacaaattaaaatgtctgataatggaccccaatcaaaccaacgtagtgccccccgcattacatttggtggacccacagattcaactgacaataaccagaatggaggacgcaatggggcaaggccaaaacagcgccgaccccaaggtttacccaataatactgcgtcttggttcacagctctcactcagcatggcaaggaggaacttagattccctcgaggccagggcgttccaatcaacaccaatagtggtccagatgaccaaattggctactaccgaagagctacccgacgagttcgtggtggtgacggcaaaatgaaagagctcagccccagatggtacttctattacctaggaactggcccagaagcttcacttccctacggcgctaacaaagaaggcatcgtatgggttgcaactgagggagccttgaatacacccaaagaccacattggcacccgcaatcctaataacaatgctgccaccgtgctacaacttcctcaaggaacaacattgccaaaaggcttctacgcagagggaagcagaggcggcagtcaagcctcttctcgctcctcatcacgtagtcgcggtaattcaagaaattcaactcctggcagcagtaggggaaattctcctgctcgaatggctagcggaggtggtgaaactgccctcgcgctattgctgctagacagattgaaccagcttgagagcaaagtttctggtaaaggccaacaacaacaaggccaaactgtcactaagaaatctgctgctgaggcatctaaaaagcctcgccaaaaacgtactgccacaaaacagtacaacgtcactcaagcatttgggagacgtggtccagaacaaacccaaggaaatttcggggaccaagacctaatcagacaaggaactgattacaaacattggccgcaaattgcacaatttgctccaagtgcctctgcattctttggaatgtcacgcattggcatggaagtcacaccttcgggaacatggctgacttatcatggagccattaaattggatgacaaagatccacaattcaaagacaacgtcatactgctgaacaagcacattgacgcatacaaaacattcccaccaacagagcctaaaaaggacaaaaagaaaaagactgatgaagctcagcctttgccgcagagacaaaagaagcagcccactgtgactcttcttcctgcggctgacatggatgatttctccagacaacttcaaaattccatgagtggagcttctgctgattcaactcaggcataaacactcatgatgaccacacaaggcagatgggctatgtaaacgttttcgcaattccgtttacgatacatagtctactcttgtgcagaatgaattctcgtaactaaacagcacaagtaggtttagttaactttaatctcacatagcaatctttaatcaatgtgtaacattagggaggacttgaaagagccaccacattttcatcgaggccacgcggagtacgatcgagggtacagtgaataatgctagggagagctgcctatatggaagagc

SEQ ID NO: 47 - DNA, 29725 bp, Coronavirus
ccaggaaaagccaaccaacctcgatctcttgtagatctgttctctaaacgaactttaaaatctgtgtagctgtcgctcggctgcatgcctagtgcacctacgcagtataaacaataataaattttactgtcgttgacaagaaacgagtaactcgtccctcttctgcagactgcttacggtttcgtccgtgttgcagtcgatcatcagcatacctaggtttcgtccgggtgtgaccgaaaggtaagatggagagccttgttcttggtgtcaacgagaaaacacacgtccaactcagtttgcctgtccttcaggttagagacgtgctagtgcgtggcttcggggactctgtggaagaggccctatcggaggcacgtgaacacctcaaaaatggcacttgtggtctagtagagctggaaaaaggcgtactgccccagcttgaacagccctatgtgttcattaaacgttctgatgccttaagcaccaatcacggccacaaggtcgttgagctggttgcagaaatggacggcattcagtacggtcgtagcggtataacactgggagtactcgtgccacatgtgggcgaaaccccaattgcataccgcaatgttcttcttcgtaagaacggtaataagggagccggtggtcatagctatggcatcgatctaaagtcttatgacttaggtgacgagcttggcactgatcccattgaagattatgaacaaaactggaacactaagcatggcagtggtgcactccgtgaactcactcgtgagctcaatggaggtgcagtcactcgctatgtcgacaacaatttctgtggcccagatgggtaccctcttgattgcatcaaagattttctcgcacgcgcgggcaagtcaatgtgcactctttccgaacaacttgattacatcgagtcgaagagaggtgtctactgctgccgtgaccatgagcatgaaattgcctggttcactgagcgctctgataagagctacgagcaccagacacccttcgaaattaagagtgccaagaaatttgacactttcaaaggggaatgcccaaagtttgtgtttcctcttaactcaaaagtcaaagtcattcaaccacgtgttgaaaagaaaaagactgagggtttcatggggcgtatacgctctgtgtaccctgttgcatctccacaggagtgtaacaatatgcacttgtctaccttgatgaaatgtaatcattgcgatgaagtttcatggcagacgtgcgactttctgaaagccacttgtgaacattgtggcactgaaaatttagttattgaaggacctactacatgtgggtacctacctactaatgctgtagtgaaaatgccatgtcctgcctgtcaagacccagagattggacctgagcatagtgttgcagattatcacaaccactcaaacattgaaactcgactccgcaagggaggtaggactagatgttttggaggctgtgtgtttgcctatgttggctgctataataagcgtgcctactgggttcctcgtgctagtgctgatattggctcaggccatactggcattactggtgacaatgtggagaccttgaatgaggatctccttgagatactgagtcgtgaacgtgttaacattaacattgttggcgattttcatttgaatgaagaggttgccatcattttggcatctttctctgcttctacaagtgcctttattgacactataaagagtcttgattacaagtctttcaaaaccattgttgagtcctgcggtaactataaagttaccaagggaaagcccgtaaaaggtgcttggaacattggacaacagagatcagttttaacaccactgtgtggttttccctcacaggctgctggtgttatcagatcaatttttgcgcgcacacttgatgcagcaaaccactcaattcctgatttgcaaagagcagctgtcaccatacttgatggtatttctgaacagtcattacgtcttgtcgacgccatggtttatacttcagacctgctcaccaacagtgtcattattatggcatatgtaactggtggtcttgtacaacagacttctcagtggttgtctaatcttttgggcactactgttgaaaaactcaggcctatctttgaatggattgaggcgaaacttagtgcaggagttgaatttctcaaggatgcttgggagattctcaaatttctcattacaggtgtttttgacatcgtcaagggtcaaatacaggttgcttcagataacatcaaggattgtgtaaaatgcttcattgatgttgttaacaaggcactcgaaatgtgcattgatcaagtcactatcgctggcgcaaagttgcgatcactcaacttaggtgaagtcttcatcgctcaaagcaagggactttaccgtcagtgtatacgtggcaaggagcagctgcaactactcatgcctcttaaggcaccaaaagaagtaacctttcttgaaggtgattcacatgacacagtacttacctctgaggaggttgttctcaagaacggtgaactcgaagcactcgagacgcccgttgatagcttcacaaatggagctatcgttggcacaccagtctgtgtaaatggcctcatgctcttagagattaaggacaaagaacaatactgcgcattgtctcctggtttactggctacaaacaatgtctttcgcttaaaagggggtgcaccaattaaaggtgtaacctttggagaagatactgtttgggaagttcaaggttacaagaatgtgagaatcacatttgagcttgatgaacgtgttgacaaagtgcttaatgaaaagtgctctgtctacactgttgaatccggtaccgaagttactgagtttgcatgtgttgtagcagaggctgttgtgaagactttacaaccagtttctgatctccttaccaacatgggtattgatcttgatgagtggagtgtagctacattctacttatttgatgatgctggtgaagaaaacttttcatcacgtatgtattgttccttttaccctccagatgaggaagaagaggacgatgcagagtgtgaggaagaagaaattgatgaaacctgtgaacatgagtacggtacagaggatgattatcaaggtctccctctggaatttggtgcctcagctgaaacagttcgagttgaggaagaagaagaggaagactggctggatgatactactgagcaatcagagattgagccagaaccagaacctacacctgaagaaccagttaatcagtttactggttatttaaaacttactgacaatgttgccattaaatgtgttgacatcgttaaggaggcacaaagtgctaatcctatggtgattgtaaatgctgctaacatacacctgaaacatggtggtggtgtagcaggtgcactcaacaaggcaaccaatggtgccatgcaaaaggagagtgatgattacattaagctaaatggccctcttacagtaggagggtcttgtttgctttctggacataatcttgctaagaagtgtctgcatgttgttggacctaacctaaatgcaggtgaggacatccagcttcttaaggcagcatatgaaaatttcaattcacaggacatcttacttgcaccattgttgtcagcaggcatatttggtgctaaaccacttcagtctttacaagtgtgcgtgcagacggttcgtacacaggtttatattgcagtcaatgacaaagctctttatgagcaggttgtcatggattatcttgataacctgaagcctagagtggaagcacctaaacaagaggagccaccaaacacagaagattccaaaactgaggagaaatctgtcgtacagaagcctgtcgatgtgaagccaaaaattaaggcctgcattgatgaggttaccacaacactggaagaaactaagtttcttaccaataagttactcttgtttgctgatatcaatggtaagctttaccatgattctcagaacatgcttagaggtgaagatatgtctttccttgagaaggatgcaccttacatggtaggtgatgttatcactagtggtgatatcacttgtgttgtaataccctccaaaaaggctggtggcactactgagatgctctcaagagctttgaagaaagtgccagttgatgagtatataaccacgtaccctggacaaggatgtgctggttatacacttgaggaagctaagactgctcttaagaaatgcaaatctgcattttatgtactaccttcagaagcacctaatgctaaggaagagattctaggaactgtatcctggaatttgagagaaatgcttgctcatgctgaagagacaagaaaattaatgcctatatgcatggatgttagagccataatggcaaccatccaacgtaagtataaaggaattaaaattcaagagggcatcgttgactatggtgtccgattcttcttttatactagtaaagagcctgtagcttctattattacgaagctgaactctctaaatgagccgcttgtcacaatgccaattggttatgtgacacatggttttaatcttgaagaggctgcgcgctgtatgcgttctcttaaagctcctgccgtagtgtcagtatcatcaccagatgctgttactacatataatggatacctcacttcgtcatcaaagacatctgaggagcactttgtagaaacagtttctttggctggctcttacagagattggtcctattcaggacagcgtacagagttaggtgttgaatttcttaagcgtggtgacaaaattgtgtaccacactctggagagccccgtcgagtttcatcttgacggtgaggttctttcacttgacaaactaaagagtctcttatccctgcgggaggttaagactataaaagtgttcacaactgtggacaacactaatctccacacacagcttgtggatatgtctatgacatatggacagcagtttggtccaacatacttggatggtgctgatgttacaaaaattaaacctcatgtaaatcatgagggtaagactttctttgtactacctagtgatgacacactacgtagtgaagctttcgagtactaccatactcttgatgagagttttcttggtaggtacatgtctgctttaaaccacacaaagaaatggaaatttcctcaagttggtggtttaacttcaattaaatgggctgataacaattgttatttgtctagtgttttattagcacttcaacagcttgaagtcaaattcaatgcaccagcacttcaagaggcttattatagagcccgtgctggtgatgctgctaacttttgtgcactcatactcgcttacagtaataaaactgttggcgagcttggtgatgtcagagaaactatgacccatcttctacagcatgctaatttggaatctgcaaagcgagttcttaatgtggtgtgtaaacattgtggtcagaaaactactaccttaacgggtgtagaagctgtgatgtatatgggtactctatcttatgataatcttaagacaggtgtttccattccatgtgtgtgtggtcgtgatgctacacaatatctagtacaacaagagtcttcttttgttatgatgtctgcaccacctgctgagtataaattacagcaaggtacattcttatgtgcgaatgagtacactggtaactatcagtgtggtcattacactcatataactgctaaggagaccctctatcgtattgacggagctcaccttacaaagatgtcagagtacaaaggaccagtgactgatgttttctacaaggaaacatcttacactacaaccatcaagcctgtgtcgtataaactcgatggagttacttacacagagattgaaccaaaattggatgggtattataaaaaggataatgcttactatacagagcagcctatagaccttgtaccaactcaaccattaccaaatgcgagttttgataatttcaaactcacatgttctaacacaaaatttgctgatgatttaaatcaaatgacaggcttcacaaagccagcttcacgagagctatctgtcacattcttcccagacttgaatggcgatgtagtggctattgactatagacactattcagcgagtttcaagaaaggtgctaaattactgcataagccaattgtttggcacattaaccaggctacaaccaagacaacgttcaaaccaaacacttggtgtttacgttgtctttggagtacaaagccagtagatacttcaaattcatttgaagttctggcagtagaagacacacaaggaatggacaatcttgcttgtgaaagtcaacaacccacctctgaagaagtagtggaaaatcctaccatacagaaggaagtcatagagtgtgacgtgaaaactaccgaagttgtaggcaatgtcatacttaaaccatcagatgaaggtgttaaagtaacacaagagttaggtcatgaggatcttatggctgcttatgtggaaaacacaagcattaccattaagaaacctaatgagctttcactagccttaggtttaaaaacaattgccactcatggtattgctgcaattaatagtgttccttggagtaaaattttggcttatgtcaaaccattcttaggacaagcagcaattacaacatcaaattgcgctaagagattagcacaacgtgtgtttaacaattatatgccttatgtgtttacattattgttccaattgtgtacttttactaaaagtaccaattctagaattagagcttcactacctacaactattgctaaaaatagtgttaagagtgttgctaaattatgtttggatgccggcattaattatgtgaagtcacccaaattttctaaattgttcacaatcgctatgtggctattgttgttaagtatttgcttaggttctctaatctgtgtaactgctgcttttggtgtactcttatctaattttggtgctccttcttattgtaatggcgttagagaattgtatcttaattcgtctaacgttactactatggatttctgtgaaggttcttttccttgcagcatttgtttaagtggattagactcccttgattcttatccagctcttgaaaccattcaggtgacgatttcatcgtacaagctagacttgacaattttaggtctggccgctgagtgggttttggcatatatgttgttcacaaaattcttttatttattaggtctttcagctataatgcaggtgttctttggctattttgctagtcatttcatcagcaattcttggctcatgtggtttatcattagtattgtacaaatggcacccgtttctgcaatggttaggatgtacatcttctttgcttctttctactacatatggaagagctatgttcatatcatggatggttgcacctcttcgacttgcatgatgtgctataagcgcaatcgtgccacacgcgttgagtgtacaactattgttaatggcatgaagagatctttctatgtctatgcaaatggaggccgtggcttctgcaagactcacaattggaattgtctcaattgtgacacattttgcactggtagtacattcattagtgatgaagttgctcgtgatttgtcactccagtttaaaagaccaatcaaccctactgaccagtcatcgtatattgttgatagtgttgctgtgaaaaatggcgcgcttcacctctactttgacaaggctggtcaaaagacctatgagagacatccgctctcccattttgtcaatttagacaatttgagagctaacaacactaaaggttcactgcctattaatgtcatagtttttgatggcaagtccaaatgcgacgagtctgcttctaagtctgcttctgtgtactacagtcagctgatgtgccaacctattctgttgcttgaccaagctcttgtatcagacgttggagatagtactgaagtttccgttaagatgtttgatgcttatgtcgacaccttttcagcaacttttagtgttcctatggaaaaacttaaggcacttgttgctacagctcacagcgagttagcaaagggtgtagctttagatggtgtcctttctacattcgtgtcagctgcccgacaaggtgttgttgataccgatgttgacacaaaggatgttattgaatgtctcaaactttcacatcactctgacttagaagtgacaggtgacagttgtaacaatttcatgctcacctataataaggttgaaaacatgacgcccagagatcttggcgcatgtattgactgtaatgcaaggcatatcaatgcccaagtagcaaaaagtcacaatgtttcactcatctggaatgtaaaagactacatgtctttatctgaacagctgcgtaaacaaattcgtagtgctgccaagaagaacaacataccttttagactaacttgtgctacaactagacaggttgtcaatgtcataactactaaaatctcactcaagggtggtaagattgttagtacttgttttaaacttatgcttaaggccacattattgtgcgttcttgctgcattggtttgttatatcgttatgccattacatacattgtcaatccatgatggttacacaaatgaaatcattggttacaaagccattcaggatggtgtcactcgtgacatcatttctactgatgattgttttgcaaataaacatgctggttttgacgcatggtttagccagcgtggtggttcatacaaaaatgacaaaagctgccctgtagtagctgctatcattacaagagagattggtttcatagtgcctggcttaccgggtactgtgctgagagcaatcaatggtgacttcttgcattttctacctcgtgtttttagtgctgttggcaacatttgctacacaccttccaaactcattgagtatagtgattttgctacctctgcttgcgttcttgctgctgagtgtacaatttttaaggatgctatgggcaaacctgtgccatattgttatgacactaatttgctagagggttctatttcttatagtgagcttcgtccagacactcgttatgtgcttatggatggttccatcatacagtttcctaacacttacctggagggttctgttagagtagtaacaacttttgatgctgagtactgtagacatggtacatgcgaaaggtcagaagtaggtatttgcctatctaccagtggtagatgggttcttaataatgagcattacagagctctatcaggagttttctgtggtgttgatgcgatgaatctcatagctaacatctttactcctcttgtgcaacctgtgggtgctttagatgtgtctgcttcagtagtggctggtggtattattgccatattggtgacttgtgctgcctactactttatgaaattcagacgtgcttttggtgagtacaaccatgttgttgctgctaatgcacttttgtttttgatgtctttcactatactctgtctggtaccagcttacagctttctgccgggagtctactcagtcttttacttgtacttgacattctatttcaccaatgatgtttcattcttggctcaccttcaatggtttgccatgttttctcctattgtgcctttttggataacagcaatctatgtattctgtatttctctgaagcactgccattggttctttaacaactatcttaggaaaagagtcatgtttaatggagttacatttagtaccttcgaggaggctgctttgtgtacctttttgctcaacaaggaaatgtacctaaaattgcgtagcgagacactgttgccacttacacagtataacaggtatcttgctctatataacaagtacaagtatttcagtggagtcttagatactaccagctatcgtgaagcagcttgctgccacttagcaaaggctctaaatgactttagcaactcaggtgctgatgttctctaccaaccaccacagacatcaatcacttctgctgttctgcagagtggttttaggaaaatggcattcccgtcaggcaaagttgaagggtgcatggtacaagtaacctgtggaactacaactcttaatggattgtggttggatgacacagtatactgtccaagacatgtcatttgcacagcagaagacatgcttaatcctaactatgaagatctgctcattcgcaaatccaaccatagctttcttgttcaggctggcaatgttcaacttcgtgttattggccattctatgcaaaattgtctgcttaggcttaaagttgatacttctaaccctaagacacccaagtataaatttgtccgtatccaacctggtcaaacattttcagttctagcatgctacaatggttcaccatctggtgtttatcagtgtgccatgagacctaatcataccattaaaggttctttccttaatggatcatgtggtagtgttggttttaacattgattatgattgcgtgtctttctgctatatgcatcatatggagcttccaacaggagtacacgctggtactgacttagaaggtaaattctatggtccatttgttgacagacaaactgcacaggctgcaggtacagacacaaccataaccttaaatgttttggcatggctgtatgctgctgttatcaatggtgataggtggtttcttaatagattcaccactactttgaatgactttaaccttgtggcaatgaagtacaactatgaacctttgacacaagatcatgttgacatattgggacctctttctgctcaaacaggaattgccgtcttagatatgtgtgctgctttgaaagagctgctgcagaatggtatgaatggtcgtactatccttggtagcactattttagaagatgagtttacaccatttgatgttgttagacaatgctctggtgttaccttccaaggtaagttcaagaaaattgttaagggcactcatcattggatgcttttaactttcttgacatcactattgattcttgttcaaagtacacagtggtcactgtttttctttgtttacgagaatgctttcttgccatttactcttggtattatggcaattgctgcatgtgctatgctgcttgttaagcataagcacgcattcttgtgcttgtttctgttaccttctcttgcaacagttgcttactttaatatggtctacatgcctgctagctgggtgatgcgtatcatgacatggcttgaattggctgacactagcttgtctggttataggcttaaggattgtgttatgtatgcttcagctttagttttgcttattctcatgacagctcgcactgtttatgatgatgctgctagacgtgtttggacactgatgaatgtcattacacttgtttacaaagtctactatggtaatgctttagatcaagctatttccatgtgggccttagttatttctgtaacctctaactattctggtgtcgttacgactatcatgtttttagctagagctatagtgtttgtgtgtgttgagtattacccattgttatttattactggcaacaccttacagtgtatcatgcttgtttattgtttcttaggctattgttgctgctgctactttggccttttctgtttactcaaccgttacttcaggcttactcttggtgtttatgactacttggtctctacacaagaatttaggtatatgaactcccaggggcttttgcctcctaagagtagtattgatgctttcaagcttaacattaagttgttgggtattggaggtaaaccatgtatcaaggttgctactgtacagtctaaaatgtctgacgtaaagtgcacatctgtggtactgctctcggttcttcaacaacttagagtagagtcatcttctaaattgtgggcacaatgtgtacaactccacaatgatattcttcttgcaaaagacacaactgaagctttcgagaagatggtttctcttttgtctgttttgctatccatgcagggtgctgtagacattaataggttgtgcgaggaaatgctcgataaccgtgctactcttcaggctattgcttcagaatttagttctttaccatcatatgccgcttatgccactgcccaggaggcctatgagcaggctgtagctaatggtgattctgaagtcgttctcaaaaagttaaagaaatctttgaatgtggctaaatctgagtttgaccgtgatgctgccatgcaacgcaagttggaaaagatggcagatcaggctatgacccaaatgtacaaacaggcaagatctgaggacaagagggcaaaagtaactagtgctatgcaaacaatgctcttcactatgcttaggaagcttgataatgatgcacttaacaacattatcaacaatgcgcgtgatggttgtgttccactcaacatcataccattgactacagcagccaaactcatggttgttgtccctgattatggtacctacaagaacacttgtgatggtaacacctttacatatgcatctgcactctgggaaatccagcaagttgttgatgcggatagcaagattgttcaacttagtgaaattaacatggacaattcaccaaatttggcttggcctcttattgttacagctctaagagccaactcagctgttaaactacagaataatgaactgagtccagtagcactacgacagatgtcctgtgcggctggtaccacacaaacagcttgtactgatgacaatgcacttgcctactataacaattcgaagggaggtaggtttgtgctggcattactatcagaccaccaagatctcaaatgggctagattccctaagagtgatggtacaggtacaatttacacagaactggaaccaccttgtaggtttgttacagacacaccaaaagggcctaaagtgaaatacttgtacttcatcaaaggcttaaacaacctaaatagaggtatggtgctgggcagtttagctgctacagtacgtcttcaggctggaaatgctacagaagtacctgccaattcaactgtgctttccttctgtgcttttgcagtagaccctgctaaagcatataaggattacctagcaagtggaggacaaccaatcaccaactgtgtgaagatgttgtgtacacacactggtacaggacaggcaattactgtaacaccagaagctaacatggaccaagagtcctttggtggtgcttcatgttgtctgtattgtagatgccacattgaccatccaaatcctaaaggattctgtgacttgaaaggtaagtacgtccaaatacctaccacttgtgctaatgacccagtgggttttacacttagaaacacagtctgtaccgtctgcggaatgtggaaaggttatggctgtagttgtgaccaactccgcgaacccttgatgcagtctgcggatgcatcaacgtttttaaacgggtttgcggtgtaagtgcagcccgtcttacaccgtgcggcacaggcactagtactgatgtcgtctacagggcttttgatatttacaacgaaaaagttgctggttttgcaaagttcctaaaaactaattgctgtcgcttccaggagaaggatgaggaaggcaatttattagactcttactttgtagttaagaggcatactatgtctaactaccaacatgaagagactatttataacttggttaaagattgtccagcggttgctgtccatgactttttcaagtttagagtagatggtgacatggtaccacatatatcacgtcagcgtctaactaaatacacaatggctgatttagtctatgctctacgtcattttgatgagggtaattgtgatacattaaaagaaatactcgtcacatacaattgctgtgatgatgattatttcaataagaaggattggtatgacttcgtagagaatcctgacatcttacgcgtatatgctaacttaggtgagcgtgtacgccaatcattattaaagactgtacaattctgcgatgctatgcgtgatgcaggcattgtaggcgtactgacattagataatcaggatcttaatgggaactggtacgatttcggtgatttcgtacaagtagcaccaggctgcggagttcctattgtggattcatattactcattgctgatgcccatcctcactttgactagggcattggctgctgagtcccatatggatgctgatctcgcaaaaccacttattaagtgggatttgctgaaatatgattttacggaagagagactttgtctcttcgaccgttattttaaatattgggaccagacataccatcccaattgtattaactgtttggatgataggtgtatccttcattgtgcaaactttaatgtgttattttctactgtgtttccacctacaagttttggaccactagtaagaaaaatatttgtagatggtgttccttttgttgtttcaactggataccattttcgtgagttaggagtcgtacataatcaggatgtaaacttacatagctcgcgtctcagtttcaaggaacttttagtgtatgctgctgatccagctatgcatgcagcttctggcaatttattgctagataaacgcactacatgcttttcagtagctgcactaacaaacaatgttgcttttcaaactgtcaaacccggtaattttaataaagacttttatgactttgctgtgtctaaaggtttctttaaggaaggaagttctgttgaactaaaacacttcttctttgctcaggatggcaacgctgctatcagtgattatgactattatcgttataatctgccaacaatgtgtgatatcagacaactcctattcgtagttgaagttgttgataaatactttgattgttacgatggtggctgtattaatgccaaccaagtaatcgttaacaatctggataaatcagctggtttcccatttaataaatggggtaaggctagactttattatgactcaatgagttatgaggatcaagatgcacttttcgcgtatactaagcgtaatgtcatccctactataactcaaatgaatcttaagtatgccattagtgcaaagaatagagctcgcaccgtagctggtgtctctatctgtagtactatgacaaatagacagtttcatcagaaattattgaagtcaatagccgccactagaggagctactgtggtaattggaacaagcaagttttacggtggctggcataatatgttaaaaactgtttacagtgatgtagaaactccacaccttatgggttgggattatccaaaatgtgacagagccatgcctaacatgcttaggataatggcctctcttgttcttgctcgcaaacataacacttgctgtaacttatcacaccgtttctacaggttagctaacgagtgtgcgcaagtattaagtgagatggtcatgtgtggcggctcactatatgttaaaccaggtggaacatcatccggtgatgctacaactgcttatgctaatagtgtctttaacatttgtcaagctgttacagccaatgtaaatgcacttctttcaactgatggtaataagatagctgacaagtatgtccgcaatctacaacacaggctctatgagtgtctctatagaaatagggatgttgatcatgaattcgtggatgagttttacgcttacctgcgtaaacatttctccatgatgattctttctgatgatgccgttgtgtgctataacagtaactatgcggctcaaggtttagtagctagcattaagaactttaaggcagttctttattatcaaaataatgtgttcatgtctgaggcaaaatgttggactgagactgaccttactaaaggacctcacgaattttgctcacagcatacaatgctagttaaacaaggagatgattacgtgtacctgccttacccagatccatcaagaatattaggcgcaggctgttttgtcgatgatattgtcaaaacagatggtacacttatgattgaaaggttcgtgtcactggctattgatgcttacccacttacaaaacatcctaatcaggagtatgctgatgtctttcacttgtatttacaatacattagaaagttacatgatgagcttactggccacatgttggacatgtattccgtaatgctaactaatgataacacctcacggtactgggaacctgagttttatgaggctatgtacacaccacatacagtcttgcaggctgtaggtgcttgtgtattgtgcaattcacagacttcacttcgttgcggtgcctgtattaggagaccattcctatgttgcaagtgctgctatgaccatgtcatttcaacatcacacaaattagtgttgtctgttaatccctatgtttgcaatgccccaggttgtgatgtcactgatgtgacacaactgtatctaggaggtatgagctattattgcaagtcacataagcctcccattagttttccattatgtgctaatggtcaggtttttggtttatacaaaaacacatgtgtaggcagtgacaatgtcactgacttcaatgcgatagcaacatgtgattggactaatgctggcgattacatacttgccaacacttgtactgagagactcaagcttttcgcagcagaaacgctcaaagccactgaggaaacatttaagctgtcatatggtattgccactgtacgcgaagtactctctgacagagaattgcatctttcatgggaggttggaaaacctagaccaccattgaacagaaactatgtctttactggttaccgtgtaactaaaaatagtaaagtacagattggagagtacacctttgaaaaaggtgactatggtgatgctgttgtgtacagaggtactacgacatacaagttgaatgttggtgattactttgtgttgacatctcacactgtaatgccacttagtgcacctactctagtgccacaagagcactatgtgagaattactggcttgtacccaacactcaacatctcagatgagttttctagcaatgttgcaaattatcaaaaggtcggcatgcaaaagtactctacactccaaggaccacctggtactggtaagagtcattttgccatcggacttgctctctattacccatctgctcgcatagtgtatacggcatgctctcatgcagctgttgatgccctatgtgaaaaggcattaaaatatttgcccatagataaatgtagtagaatcatacctgcgcgtgcgcgcgtagagtgttttgataaattcaaagtgaattcaacactagaacagtatgttttctgcactgtaaatgcattgccagaaacaactgctgacattgtagtctttgatgaaatctctatggctactaattatgacttgagtgttgtcaatgctagacttcgtgcaaaacactacgtctatattggcgatcctgctcaattaccagccccccgcacattgctgactaaaggcacactagaaccagaatattttaattcagtgtgcagacttatgaaaacaataggtccagacatgttccttggaacttgtcgccgttgtcctgctgaaattgttgacactgtgagtgctttagtttatgacaataagctaaaagcacacaaggagaagtcagctcaatgcttcaaaatgttctacaaaggtgttattacacatgatgtttcatctgcaatcaacagacctcaaataggcgttgtaagagaatttcttacacgcaatcctgcttggagaaaagctgtttttatctcaccttataattcacagaacgctgtagcttcaaaaatcttaggattgcctacgcagactgttgattcatcacagggttctgaatatgactatgtcatattcacacaaactactgaaacagcacactcttgtaatgtcaaccgcttcaatgtggctatcacaagggcaaaaattggcattttgtgcataatgtctgatagagatctttatgacaaactgcaatttacaagtctagaaataccacgtcgcaatgtggctacattacaagcagaaaatgtaactggactttttaaggactgtagtaagatcattactggtcttcatcctacacaggcacctacacacctcagcgttgatataaagttcaagactgaaggattatgtgttgacataccaggcataccaaaggacatgacctaccgtagactcatctctatgatgggtttcaaaatgaattaccaagtcaatggttaccctaatatgtttatcacccgcgaagaagctattcgtcacgttcgtgcgtggattggctttgatgtagagggctgtcatgcaactagagatgctgtgggtactaacctacctctccagctaggattttctacaggtgttaacttagtagctgtaccgactggttatgttgacactgaaaataacacagaattcaccagagttaatgcaaaacctccaccaggtgaccagtttaaacatcttataccactcatgtataaaggcttgccctggaatgtagtgcgtattaagatagtacaaatgctcagtgatacactgaaaggattgtcagacagagtcgtgttcgtcctttgggcgcatggctttgagcttacatcaatgaagtactttgtcaagattggacctgaaagaacgtgttgtctgtgtgacaaacgtgcaacttgcttttctacttcatcagatacttatgcctgctggaatcattctgtgggttttgactatgtctataacccatttatgattgatgttcagcagtggggctttacgggtaaccttcagagtaaccatgaccaacattgccaggtacatggaaatgcacatgtggctagttgtgatgctatcatgactagatgtttagcagtccatgagtgctttgttaagcgcgttgattggtctgttgaataccctattataggagatgaactgagggttaattctgcttgcagaaaagtacaacacatggttgtgaagtctgcattgcttgctgataagtttccagttcttcatgacattggaaatccaaaggctatcaagtgtgtgcctcaggctgaagtagaatggaagttctacgatgctcagccatgtagtgacaaagcttacaaaatagaggaactcttctattcttatgctacacatcacgataaattcactgatggtgtttgtttgttttggaattgtaacgttgatcgttacccagccaatgcaattgtgtgtaggtttgacacaagagtcttgtcaaacttgaacttaccaggctgtgatggtggtagtttgtatgtgaataagcatgcattccacactccagctttcgataaaagtgcatttactaatttaaagcaattgcctttcttttactattctgatagtccttgtgagtctcatggcaaacaagtagtgtcggatattgattatgttccactcaaatctgctacgtgtattacacgatgcaatttaggtggtgctgtttgcagacaccatgcaaatgagtaccgacagtacttggatgcatataatatgatgatttctgctggatttagcctatggatttacaaacaatttgatacttataacctgtggaatacatttaccaggttacagagtttagaaaatgtggcttataatgttgttaataaaggacactttgatggacacgccggcgaagcacctgtttccatcattaataatgctgtttacacaaaggtagatggtattgatgtggagatctttgaaaataagacaacacttcctgttaatgttgcatttgagctttgggctaagcgtaacattaaaccagtgccagagattaagatactcaataatttgggtgttgatatcgctgctaatactgtaatctgggactacaaaagagaagccccagcacatgtgtctacaataggtgtctgcacaatgactgacattgccaagaaacctactgagagtgcttgttcttcacttactgtcttgtttgatggtagagtggaaggacaggtagacctttttagaaacgcccgtaatggtgttttaataacagaaggttcagtcaaaggtctaacaccttcaaagggaccagcacaagctagcgtcaatggagtcacattaattggagaatcagtaaaaacacagtttaactactttaagaaagtagacggcattattcaacagttgcctgaaacctactttactcagagcagagacttagaggattttaagcccagatcacaaatggaaactgactttctcgagctcgctatggatgaattcatacagcgatataagctcgagggctatgccttcgaacacatcgtttatggagatttcagtcatggacaacttggcggtcttcatttaatgataggcttagccaagcgctcacaagattcaccacttaaattagaggattttatccctatggacagcacagtgaaaaattacttcataacagatgcgcaaacaggttcatcaaaatgtgtgtgttctgtgattgatcttttacttgatgactttgtcgagataataaagtcacaagatttgtcagtgatttcaaaagtggtcaaggttacaattgactatgctgaaatttcattcatgctttggtgtaaggatggacatgttgaaaccttctacccaaaactacaagcaagtcaagcgtggcaaccaggtgttgcgatgcctaacttgtacaagatgcaaagaatgcttcttgaaaagtgtgaccttcagaattatggtgaaaatgctgttataccaaaaggaataatgatgaatgtcgcaaagtatactcaactgtgtcaatacttaaatacacttactttagctgtaccctacaacatgagagttattcactttggtgctggctctgataaaggagttgcaccaggtacagctgtgctcagacaatggttgccaactggcacactacttgtcgattcagatcttaatgacttcgtctccgacgcagattctactttaattggagactgtgcaacagtacatacggctaataaatgggaccttattattagcgatatgtatgaccctaggaccaaacatgtgacaaaagagaatgactctaaagaagggtttttcacttatctgtgtggatttataaagcaaaaactagccctgggtggttctatagctgtaaagataacagagcattcttggaatgctgacctttacaagcttatgggccatttctcatggtggacagcttttgttacaaatgtaaatgcatcatcatcggaagcatttttaattggggctaactatcttggcaagccgaaggaacaaattgatggctataccatgcatgctaactacattttctggaggaacacaaatcctatccagttgtcttcctattcactctttgacatgagcaaatttcctcttaaattaagaggaactgctgtaatgtctcttaaggagaatcaaatcaatgatatgatttattctcttctggaaaaaggtaggcttatcattagagaaaacaacagagttgtggtttcaagtgatattcttgttaacaactaaacgaacatgtttattttcttattatttcttactctcactagtggtagtgaccttgaccggtgcaccacttttgatgatgttcaagctcctaattacactcaacatacttcatctatgaggggggtttactatcctgatgaaatttttagatcagacactctttatttaactcaggatttatttcttccattttattctaatgttacagggtttcatactattaatcatacgtttgacaaccctgtcataccttttaaggatggtatttattttgctgccacagagaaatcaaatgttgtccgtggttgggtttttggttctaccatgaacaacaagtcacagtcggtgattattattaacaattctactaatgttgttatacgagcatgtaactttgaattgtgtgacaaccctttctttgctgtttctaaacccatgggtacacagacacatactatgatattcgataatgcatttaattgcactttcgagtacatatctgatgccttttcgcttgatgtttcagaaaagtcaggtaattttaaacacttacgagagtttgtgtttaaaaataaagatgggtttctctatgtttataagggctatcaacctatagatgtagttcgtgatctaccttctggttttaacactttgaaacctatttttaagttgcctcttggtattaacattacaaattttagagccattcttacagccttttcacctgctcaagacacttggggcacgtcagctgcagcctattttgttggctatttaaagccaactacatttatgctcaagtatgatgaaaatggtacaatcacagatgctgttgattgttctcaaaatccacttgctgaactcaaatgctctgttaagagctttgagattgacaaaggaatttaccagacctctaatttcagggttgttccctcaggagatgttgtgagattccctaatattacaaacttgtgtccttttggagaggtttttaatgctactaaattcccttctgtctatgcatgggagagaaaaaaaatttctaattgtgttgctgattactctgtgctctacaactcaacatttttttcaacctttaagtgctatggcgtttctgccactaagttgaatgatctttgcttctccaatgtctatgcagattcttttgtagtcaagggagatgatgtaagacaaatagcgccaggacaaactggtgttattgctgattataattataaattgccagatgatttcatgggttgtgtccttgcttggaatactaggaacattgatgctacttcaactggtaattataattataaatataggtatcttagacatggcaagcttaggccctttgagagagacatatctaatgtgcctttctcccctgatggcaaaccttgcaccccacctgctcttaattgttattggccattaaatgattatggtttttacaccactactggcattggctaccaaccttacagagttgtagtactttcttttgaacttttaaatgcaccggccacggtttgtggaccaaaattatccactgaccttattaagaaccagtgtgtcaattttaattttaatggactcactggtactggtgtgttaactccttcttcaaagagatttcaaccatttcaacaatttggccgtgatgtttctgatttcactgattccgttcgagatcctaaaacatctgaaatattagacatttcaccttgctcttttgggggtgtaagtgtaattacacctggaacaaatgcttcatctgaagttgctgttctatatcaagatgttaactgcactgatgtttctacagcaattcatgcagatcaactcacaccagcttggcgcatatattctactggaaacaatgtattccagactcaagcaggctgtcttataggagctgagcatgtcgacacttcttatgagtgcgacattcctattggagctggcatttgtgctagttaccatacagtttctttattacgtagtactagccaaaaatctattgtggcttatactatgtctttaggtgctgatagttcaattgcttactctaataacaccattgctatacctactaacttttcaattagcattactacagaagtaatgcctgtttctatggctaaaacctccgtagattgtaatatgtacatctgcggagattctactgaatgtgctaatttgcttctccaatatggtagcttttgcacacaactaaatcgtgcactctcaggtattgctgctgaacaggatcgcaacacacgtgaagtgttcgctcaagtcaaacaaatgtacaaaaccccaactttgaaatattttggtggttttaatttttcacaaatattacctgaccctctaaagccaactaagaggtcttttattgaggacttgctctttaataaggtgacactcgctgatgctggcttcatgaagcaatatggcgaatgcctaggtgatattaatgctagagatctcatttgtgcgcagaagttcaatggacttacagtgttgccacctctgctcactgatgatatgattgctgcctacactgctgctctagttagtggtactgccactgctggatggacatttggtgctggcgctgctcttcaaataccttttgctatgcaaatggcatataggttcaatggcattggagttacccaaaatgttctctatgagaaccaaaaacaaatcgccaaccaatttaacaaggcgattagtcaaattcaagaatcacttacaacaacatcaactgcattgggcaagctgcaagacgttgttaaccagaatgctcaagcattaaacacacttgttaaacaacttagctctaattttggtgcaatttcaagtgtgctaaatgatatcctttcgcgacttgataaagtcgaggcggaggtacaaattgacaggttaattacaggcagacttcaaagccttcaaacctatgtaacacaacaactaatcagggctgctgaaatcagggcttctgctaatcttgctgctactaaaatgtctgagtgtgttcttggacaatcaaaaagagttgacttttgtggaaagggctaccaccttatgtccttcccacaagcagccccgcatggtgttgtcttcctacatgtcacgtatgtgccatcccaggagaggaacttcaccacagcgccagcaatttgtcatgaaggcaaagcatacttccctcgtgaaggtgtttttgtgtttaatggcacttcttggtttattacacagaggaacttcttttctccacaaataattactacagacaatacatttgtctcaggaaattgtgatgtcgttattggcatcattaacaacacagtttatgatcctctgcaacctgagcttgactcattcaaagaagagctggacaagtacttcaaaaatcatacatcaccagatgttgatcttggcgacatttcaggcattaacgcttctgtcgtcaacattcaaaaagaaattgaccgcctcaatgaggtcgctaaaaatttaaatgaatcactcattgaccttcaagaattgggaaaatatgagcaatatattaaatggccttggtatgtttggctcggcttcattgctggactaattgccatcgtcatggttacaatcttgctttgttgcatgactagttgttgcagttgcctcaagggtgcatgctcttgtggttcttgctgcaagtttgatgaggatgactctgagccagttctcaagggtgtcaaattacattacacataaacgaacttatggatttgtttatgagattttttactcttggatcaattactgcacagccagtaaaaattgacaatgcttctcctgcaagtactgttcatgctacagcaacgataccgctacaagcctcactccctttcggatggcttgttattggcgttgcatttcttgctgtttttcagagcgctaccaaaataattgcgctcaataaaagatggcagctagccctttataagggcttccagttcatttgcaatttactgctgctatttgttaccatctattcacatcttttgcttgtcgctgcaggtatggaggcgcaatttttgtacctctatgccttgatatattttctacaatgcatcaacgcatgtagaattattatgagatgttggctttgttggaagtgcaaatcccagaacccattactttatgatgccaactactttgtttgctggcacacacataactatgactactgtataccatataacagtgtcacagatacaattgtcgttactgaaggtgacggcatttcaacaccaaaactcaaagaagactaccaaattggtggttattctgaggataggcactcaggtgttaaagactatgtcgttgtacatggctatttcaccgaagtttactaccagcttgagtctacacaaattactacagacactggtattgaaaatgctacattcttcatctttaacaagcttgttaaagacccaccgaatgtgcaaatacacacaatcgacggctcttcaggagttgctaatccagcaatggatcccatttatgatgagccgacgacgactactagcgtgcctttgtaagcacaagaaagtgagtacgaacttatgtactcattcgtttcggaagaaacaggtacgttaatagttaatagcgtacttctttttcttgctttcgtggtattcttgctagtcacactagccatccttactgcgcttcgattgtgtgcgtactgctgcaatattgttaacgtgagtttagtaaaaccaacggtttacgtctactcgcgtgttaaaaatctgaactcttctgaaggagttcctgatcttctggtctaaacgaactaactattattattattctgtttggaactttaacattgcttatcatggcagacaacggtactattaccgttgaggagcttaaacaactcctggaacaatggaacctagtaataggtttcctattcctagcctggattatgttactacaatttgcctattctaatcggaacaggtttttgtacataataaagcttgttttcctctggctcttgtggccagtaacacttgcttgttttgtgcttgctgctgtctacagaattaattgggtgactggcgggattgcgattgcaatggcttgtattgtaggcttgatgtggcttagctacttcgttgcttccttcaggctgtttgctcgtacccgctcaatgtggtcattcaacccagaaacaaacattcttctcaatgtgcctctccgggggacaattgtgaccagaccgctcatggaaagtgaacttgtcattggtgctgtgatcattcgtggtcacttgcgaatggccggacactccctagggcgctgtgacattaaggacctgccaaaagagatcactgtggctacatcacgaacgctttcttattacaaattaggagcgtcgcagcgtgtaggcactgattcaggttttgctgcatacaaccgctaccgtattggaaactataaattaaatacagaccacgccggtagcaacgacaatattgctttgctagtacagtaagtgacaacagatgtttcatcttgttgacttccaggttacaatagcagagatattgattatcattatgaggactttcaggattgctatttggaatcttgacgttataataagttcaatagtgagacaattatttaagcctctaactaagaagaattattcggagttagatgatgaagaacttatggagttagattatccataaaacgaacatgaaaattattctcttcctgacattgattgtatttacatcttgcgagctatatcactatcaggagtgtgttagaggtacgactgtactactaaaagaaccttgcccatcaggaacatacgagggcaattcaccatttcaccctcttgctgacaataaatttgcactaacttgcactagcacacactttgcttttgcttgtgctgacggtactcgacatacctatcagctgcgtgcaagatcagtttcaccaaaacttttcatcagacaagaggaggttcaacaagagctctactcgccactttttctcattgttgctgctctagtatttttaatactttgcttcaccattaagagaaagacagaatgaatgagctcactttaattgacttctatttgtgctttttagcctttctgctattccttgttttaataatgcttattatattttggttttcactcgaaatccaggatctagaagaaccttgtaccaaagtctaaacgaacatgaaacttctcattgttttgacttgtatttctctatgcagttgcatacgcactgtagtacagcgctgtgcatctaataaacctcatgtgcttgaagatccttgtaaggtacaacactaggggtaatacttatagcactgcttggctttgtgctctaggaaaggttttaccttttcatagatggcacactatggttcaaacatgcacacctaatgttactatcaactgtcaagatccagctggtggtgcgcttatagctaggtgttggtaccttcatgaaggtcaccaaactgctgcatttagagacgtacttgttgttttaaataaacgaacaaattaaaatgtctgataatggaccccaatcaaaccaacgtagtgccccccgcattacatttggtggacccacagattcaactgacaataaccagaatggaggacgcaatggggcaaggccaaaacagcgccgaccccaaggtttacccaataatactgcgtcttggttcacagctctcactcagcatggcaaggaggaacttagattccctcgaggccagggcgttccaatcaacaccaatagtggtccagatgaccaaattggctactaccgaagagctacccgacgagttcgtggtggtgacggcaaaatgaaagagctcagccccagatggtacttctattacctaggaactggcccagaagcttcacttccctacggcgctaacaaagaaggcatcgtatgggttgcaactgagggagccttgaatacacccaaagaccacattggcacccgcaatcctaataacaatgctgccaccgtgctacaacttcctcaaggaacaacattgccaaaaggcttctacgcagagggaagcagaggcggcagtcaagcctcttctcgctcctcatcacgtagtcgcggtaattcaagaaattcaactcctggcagcagtaggggaaattctcctgctcgaatggctagcggaggtggtgaaactgccctcgcgctattgctgctagacagattgaaccagcttgagagcaaagtttctggtaaaggccaacaacaacaaggccaaactgtcactaagaaatctgctgctgaggcatctaaaaagcctcgccaaaaacgtactgccacaaaacagtacaacgtcactcaagcatttgggagacgtggtccagaacaaacccaaggaaatttcggggaccaagacctaatcagacaaggaactgattacaaacattggccgcaaattgcacaatttgctccaagtgcctctgcattctttggaatgtcacgcattggcatggaagtcacaccttcgggaacatggctgacttatcatggagccattaaattggatgacaaagatccacaattcaaagacaacgtcatactgctgaacaagcacattgacgcatacaaaacattcccaccaacagagcctaaaaaggacaaaaagaaaaagactgatgaagctcagcctttgccgcagagacaaaagaagcagcccactgtgactcttcttcctgcggctgacatggatgatttctccagacaacttcaaaattccatgagtggagcttctgctgattcaactcaggcataaacactcatgatgaccacacaaggcagatgggctatgtaaacgttttcgcaattccgtttacgatacatagtctactcttgtgcagaatgaattctcgtaactaaacagcacaagtaggtttagttaactttaatctcacatagcaatctttaatcaatgtgtaacattagggaggacttgaaagagccaccacattttcatcgaggccacgcggagtacgatcgagggtacagtgaataatgctagggagagctgcctatatggaagagccctaatgtgtaaaattaattttagtagtgctatccccatgtgattttaatagcttcttaggagaatgacaaaaaaaaaaaaaaaaa

SEQ ID NO: 48 - DNA, 29745 bp, Coronavirus
atattaggtttttacctacccaggaaaagccaaccaacctcgatctcttgtagatctgttctctaaacgaactttaaaatctgtgtagctgtcgctcggctgcatgcctagtgcacctacgcagtataaacaataataaattttactgtcgttgacaagaaacgagtaactcgtccctcttctgcagactgcttacggtttcgtccgtgttgcagtcgatcatcagcatacctaggtttcgtccgggtgtgaccgaaaggtaagatggagagccttgttcttggtgtcaacgagaaaacacacgtccaactcagtttgcctgtccttcaggttagagacgtgctagtgcgtggcttcggggactctgtggaagaggccctatcggaggcacgtgaacacctcaaaaatggcacttgtggtctagtagagctggaaaaaggcgtactgccccagcttgaacagccctatgtgttcattaaacgttctgatgccttaagcaccaatcacggccacaaggtcgttgagctggttgcagaaatggacggcattcagtacggtcgtagcggtataacactgggagtactcgtgccacatgtgggcgaaaccccaattgcataccgcaatgttcttcttcgtaagaacggtaataagggagccggtggtcatagctatggcatcgatctaaagtcttatgacttaggtgacgagcttggcactgatcccattgaagattatgaacaaaactggaacactaagcatggcagtggtgcactccgtgaactcactcgtgagctcaatggaggtgcagtcactcgctatgtcgacaacaatttctgtggcccagatgggtaccctcttgattgcatcaaagattttctcgcacgcgcgggcaagtcaatgtgcactctttccgaacaacttgattacatcgagtcgaagagaggtgtctactgctgccgtgaccatgagcatgaaattgcctggttcactgagcgctctgataagagctacgagcaccagacacccttcgaaattaagagtgccaagaaatttgacactttcaaaggggaatgcccaaagtttgtgtttcctcttaactcaaaagtcaaagtcattcaaccacgtgttgaaaagaaaaagactgagggtttcatggggcgtatacgctctgtgtaccctgttgcatctccacaggagtgtaacaatatgcacttgtctaccttgatgaaatgtaatcattgcgatgaagtttcatggcagacgtgcgactttctgaaagccacttgtgaacattgtggcactgaaaatttagttattgaaggacctactacatgtgggtacctacctactaatgctgtagtgaaaatgccatgtcctgcctgtcaagacccagagattggacctgagcatagtgttgcagattatcacaaccactcaaacattgaaactcgactccgcaagggaggtaggactagatgttttggaggctgtgtgtttgcctatgttggctgctataataagcgtgcctactgggttcctcgtgctagtgctgatattggctcaggccatactggcattactggtgacaatgtggagaccttgaatgaggatctccttgagatactgagtcgtgaacgtgttaacattaacattgttggcgattttcatttgaatgaagaggttgccatcattttggcatctttctctgcttctacaagtgcctttattgacactataaagagtcttgattacaagtctttcaaaaccattgttgagtcctgcggtaactataaagttaccaagggaaagcccgtaaaaggtgcttggaacattggacaacagagatcagttttaacaccactgtgtggttttccctcacaggctgctggtgttatcagatcaatttttgcgcgcacacttgatgcagcaaaccactcaattcctgatttgcaaagagcagctgtcaccatacttgatggtatttctgaacagtcattacgtcttgtcgacgccatggtttatacttcagacctgctcaccaacagtgtcattattatggcatatgtaactggtggtcttgtacaacagacttctcagtggttgtctaatcttttgggcactactgttgaaaaactcaggcctatctttgaatggattgaggcgaaacttagtgcaggagttgaatttctcaaggatgcttgggagattctcaaatttctcattacaggtgtttttgacatcgtcaagggtcaaatacaggttgcttcagataacatcaaggattgtgtaaaatgcttcattgatgttgttaacaaggcactcgaaatgtgcattgatcaagtcactatcgctggcgcaaagttgcgatcactcaacttaggtgaagtcttcatcgctcaaagcaagggactttaccgtcagtgtatacgtggcaaggagcagctgcaactactcatgcctcttaaggcaccaaaagaagtaacctttcttgaaggtgattcacatgacacagtacttacctctgaggaggttgttctcaagaacggtgaactcgaagcactcgagacgcccgttgatagcttcacaaatggagctatcgttggcacaccagtctgtgtaaatggcctcatgctcttagagattaaggacaaagaacaatactgcgcattgtctcctggtttactggctacaaacaatgtctttcgcttaaaagggggtgcaccaattaaaggtgtaacctttggagaagatactgtttgggaagttcaaggttacaagaatgtgagaatcacatttgagcttgatgaacgtgttgacaaagtgcttaatgaaaagtgctctgtctacactgttgaatccggtaccgaagttactgagtttgcatgtgttgtagcagaggctgttgtgaagactttacaaccagtttctgatctccttaccaacatgggtattgatcttgatgagtggagtgtagctacattctacttatttgatgatgctggtgaagaaaacttttcatcacgtatgtattgttccttttaccctccagatgaggaagaagaggacgatgcagagtgtgaggaagaagaaattgatgaaacctgtgaacatgagtacggtacagaggatgattatcaaggtctccctctggaatttggtgcctcagctgaaacagttcgagttgaggaagaagaagaggaagactggctggatgatactactgagcaatcagagattgagccagaaccagaacctacacctgaagaaccagttaatcagtttactggttatttaaaacttactgacaatgttgccattaaatgtgttgacatcgttaaggaggcacaaagtgctaatcctatggtgattgtaaatgctgctaacatacacctgaaacatggtggtggtgtagcaggtgcactcaacaaggcaaccaatggtgccatgcaaaaggagagtgatgattacattaagctaaatggccctcttacagtaggagggtcttgtttgctttctggacataatcttgctaagaagtgtctgcatgttgttggacctaacctaaatgcaggtgaggacatccagcttcttaaggcagcatatgaaaatttcaattcacaggacatcttacttgcaccattgttgtcagcaggcatatttggtgctaaaccacttcagtctttacaagtgtgcgtgcagacggttcgtacacaggtttatattgcagtcaatgacaaagctctttatgagcaggttgtcatggattatcttgataacctgaagcctagagtggaagcacctaaacaagaggagccaccaaacacagaagattccaaaactgaggagaaatctgtcgtacagaagcctgtcgatgtgaagccaaaaattaaggcctgcattgatgaggttaccacaacactggaagaaactaagtttcttaccaataagttactcttgtttgctgatatcaatggtaagctttaccatgattctcagaacatgcttagaggtgaagatatgtctttccttgagaaggatgcaccttacatggtaggtgatgttatcactagtggtgatatcacttgtgttgtaataccctccaaaaaggctggtggcactactgagatgctctcaagagctttgaagaaagtgccagttgatgagtatataaccacgtaccctggacaaggatgtgctggttatacacttgaggaagctaagactgctcttaagaaatgcaaatctgcattttatgtactaccttcagaagcacctaatgctaaggaagagattctaggaactgtatcctggaatttgagagaaatgcttgctcatgctgaagagacaagaaaattaatgcctatatgcatggatgttagagccataatggcaaccatccaacgtaagtataaaggaattaaaattcaagagggcatcgttgactatggtgtccgattcttcttttatactagtaaagagcctgtagcttctattattacgaagctgaactctctaaatgagccgcttgtcacaatgccaattggttatgtgacacatggttttaatcttgaagaggctgcgcgctgtatgcgttctcttaaagctcctgccgtagtgtcagtatcatcaccagatgctgttactacatataatggatacctcacttcgtcatcaaagacatctgaggagcactttgtagaaacagtttctttggctggctcttacagagattggtcctattcaggacagcgtacagagttaggtgttgaatttcttaagcgtggtgacaaaattgtgtaccacactctggagagccccgtcgagtttcatcttgacggtgaggttctttcacttgacaaactaaagagtctcttatccctgcgggaggttaagactataaaagtgttcacaactgtggacaacactaatctccacacacagcttgtggataagtctatgacatatggacagcagtttggtccaacatacttggatggtgctgatgttacaaaaattaaacctcatgtaaatcatgagggtaagactttctttgtactacctagtgatgacacactacgtagtgaagctttcgagtactaccatactcttgatgagagttttcttggtaggtacatgtctgctttaaaccacacaaagaaatggaaatttcctcaagttggtggtttaacttcaattaaatgggctgataacaattgttatttgtctagtgttttattagcacttcaacagcttgaagtcaaattcaatgcaccagcacttcaagaggcttattatagagcccgtgctggtgatgctgctaacttttgtgcactcatactcgcttacagtaataaaactgttggcgagcttggtgatgtcagagaaactatgacccatcttctacagcatgctaatttggaatctgcaaagcgagttcttaatgtggtgtgtaaacattgtggtcagaaaactactaccttaacgggtgtagaagctgtgatgtatatgggtactctatcttatgataatcttaagacaggtgtttccattccatgtgtgtgtggtcgtgatgctacacaatatctagtacaacaagagtcttcttttgttatgatgtctgcaccacctgctgagtataaattacagcaaggtacattcttatgtgcgaatgagtacactgttaactatcagtgtggtcattacactcatataactgctaaggagaccctctatcgtattgacggagctcaccttacaaagatgtcagagtacaaaggaccagtgactgatgttttctacaaggaaacatcttacactacaaccatcaagcctgtgtcgtataaactcgatggagttacttacacagagattgaaccaaaattggatgggtattataaaaaggataatgcttactatacagagcagcctatagaccttgtaccaactcaaccattaccaaatgcgagttttgataatttcaaactcacatgttctaacacaaaatttgctgatgatttaaatcaaatgacaggcttcacaaagccagcttcacgagagctatctgtcacattcttcccagacttgaatggcgatgtagtggctattgactatagacactattcagcgagtttcaagaaaggtgctaaattactgcataagccaattgtttggcacattaaccaggctacaaccaagacaacgttcaaaccaaacacttggtgtttacgttgtctttggagtacaaagccagtagatacttcaaattcatttgaagttctggcagtagaagacacacaaggaatggacaatcttgcttgtgaaagtcaacaacccacctctgaagaagtagtggaaaatcctaccatacagaaggaagtcatagagtgtgacgtgaaaactaccgaagttgtaggcaatgtcatacttaaaccatcagatgaaggtgttaaagtaacacaagagttaggtcatgaggatcttatggctgcttatgtggaaaacacaagcattaccattaagaaacctaatgagctttcactagccttaggtttaaaaacaattgccactcatggtattgctgcaattaatagtgttccttggagtaaaattttggcttatgtcaaaccattcttaggacaagcagcaattacaacatcaaattgcgctaagagattagcacaacgtgtgtttaacaattatatgccttatgtgtttacattattgttccaattgtgtacttttactaaaagtaccaattctagaattagagcttcactacctacaactattgctaaaaatagtgttaagagtgttgctaaattatgtttggatgccggcattaattatgtgaagtcacccaaattttctaaattgttcacaatcgctatgtggctattgttgttaagtatttgcttaggttctctaatctgtgtaactgctgcttttggtgtactcttatctaattttggtgctccttcttattgtaatggcgttagagaattgtatcttaattcgtctaacgttactactatggatttctgtgaaggttcttttccttgcagcatttgtttaagtggattagactcccttgattcttatccagctcttgaaaccattcaggtgacgatttcatcgtacaagctagacttgacaattttaggtctggccgctgagtgggttttggcatatatgttgttcacaaaattcttttatttattaggtctttcagctataatgcaggtgttctttggctattttgctagtcatttcatcagcaattcttggctcatgtggtttatcattagtattgtacaaatggcacccgtttctgcaatggttaggatgtacatcttctttgcttctttctactacatatggaagagctatgttcatatcatggatggttgcacctcttcgacttgcatgatgtgctataagcgcaatcgtgccacacgcgttgagtgtacaactattgttaatggcatgaagagatctttctatgtctatgcaaatggaggccgtggcttctgcaagactcacaattggaattgtctcaattgtgacacattttgcactggtagtacattcattagtgatgaagttgctcgtgatttgtcactccagtttaaaagaccaatcaaccctactgaccagtcatcgtatattgttgatagtgttgctgtgaaaaatggcgcgcttcacctctactttgacaaggctggtcaaaagacctatgagagacatccgctctcccattttgtcaatttagacaatttgagagctaacaacactaaaggttcactgcctattaatgtcatagtttttgatggcaagtccaaatgcgacgagtctgcttctaagtctgcttctgtgtactacagtcagctgatgtgccaacctattctgttgcttgaccaagctcttgtatcagacgttggagatagtactgaagtttccgttaagatgtttgatgcttatgtcgacaccttttcagcaacttttagtgttcctatggaaaaacttaaggcacttgttgctacagctcacagcgagttagcaaagggtgtagctttagatggtgtcctttctacattcgtgtcagctgcccgacaaggtgttgttgataccgatgttgacacaaaggatgttattgaatgtctcaaactttcacatcactctgacttagaagtgacaggtgacagttgtaacaatttcatgctcacctataataaggttgaaaacatgacgcccagagatcttggcgcatgtattgactgtaatgcaaggcatatcaatgcccaagtagcaaaaagtcacaatgtttcactcatctggaatgtaaaagactacatgtctttatctgaacagctgcgtaaacaaattcgtagtgctgccaagaagaacaacataccttttagactaacttgtgctacaactagacaggttgtcaatgtcataactactaaaatctcactcaagggtggtaagattgttagtacttgttttaaacttatgcttaaggccacattattgtgcgttcttgctgcattggtttgttatatcgttatgccattacatacattgtcaatccatgatggttacacaaatgaaatcattggttacaaagccattcaggatggtgtcactcgtgacatcatttctactgatgattgttttgcaaataaacatgctggttttgacgcatggtttagccagcgtggtggttcatacaaaaatgacaaaagctgccctgtagtagctgctatcattacaagagagattggtttcatagtgcctggcttaccgggtactgtgctgagagcaatcaatggtgacttcttgcattttctacctcgtgtttttagtgctgttggcaacatttgctacacaccttccaaactcattgagtatagtgattttgctacctctgcttgcgttcttgctgctgagtgtacaatttttaaggatgctatgggcaaacctgtgccatattgttatgacactaatttgctagagggttctatttcttatagtgagcttcgtccagacactcgttatgtgcttatggatggttccatcatacagtttcctaacacttacctggagggttctgttagagtagtaacaacttttgatgctgagtactgtagacatggtacatgcgaaaggtcagaagtaggtatttgcctatctaccagtggtagatgggttcttaataatgagcattacagagctctatcaggagttttctgtggtgttgatgcgatgaatctcatagctaacatctttactcctcttgtgcaacctgtgggtgctttagatgtgtctgcttcagtagtggctggtggtattattgccatattggtgacttgtgctgcctactactttatgaaattcagacgtgcttttggtgagtacaaccatgttgttgctgctaatgcacttttgtttttgatgtctttcactatactctgtctggtaccagcttacagctttctgccgggagtctactcagtcttttacttgtacttgacattctatttcaccaatgatgtttcattcttggctcaccttcaatggtttgccatgttttctcctattgtgcctttttggataacagcaatctatgtattctgtatttctctgaagcactgccattggttctttaacaactatcttaggaaaagagtcatgtttaatggagttacatttagtaccttcgaggaggctgctttgtgtacctttttgctcaacaaggaaatgtacctaaaattgcgtagcgagacactgttgccacttacacagtataacaggtatcttgctctatataacaagtacaagtatttcagtggagtcttagatactaccagctatcgtgaagcagcttgctgccacttagcaaaggctctaaatgactttagcaactcaggtgctgatgttctctaccaaccaccacagacatcaatcacttctgctgttctgcagagtggttttaggaaaatggcattcccgtcaggcaaagttgaagggtgcatggtacaagtaacctgtggaactacaactcttaatggattgtggttggatgacacagtatactgtccaagacatgtcatttgcacagcagaagacatgcttaatcctaactatgaagatctgctcattcgcaaatccaaccatagctttcttgttcaggctggcaatgttcaacttcgtgttattggccattctatgcaaaattgtctgcttaggcttaaagttgatacttctaaccctaagacacccaagtataaatttgtccgtatccaacctggtcaaacattttcagttctagcatgctacaatggttcaccatctggtgtttatcagtgtgccatgagacctaatcataccattaaaggttctttccttaatggatcatgtggtagtgttggttttaacattgattatgattgcgtgtctttctgctatatgcatcatatggagcttccaacaggagtacacgctggtactgacttagaaggtaaattctatggtccatttgttgacagaccaactgcacaggctgcaggtacagacacaaccataacattaaatgttttggcatggctgtatgctgctgttatcaatggtgataggtggtttcttaatagattcaccactactttgaatgactttaaccttgtggcaatgaagtacaactatgaacctttgacacaagatcatgttgacatattgggacctctttctgctcaaacaggaattgccgtcttagatatgtgtgctgctttgaaagagctgctgcagaatggtatgaatggtcgtactatccttggtagcactattttagaagatgagtttacaccatttgatgttgttagacaatgctctggtgttaccttccaaggtaagttcaagaaaattgttaagggcactcatcattggatgcttttaactttcttgacatcactattgattcttgttcaaagtacacagtggtcactgtttttctttgtttacgagaatgctttcttgccatttactcttggtattatggcaattgctgcatgtgctatgctgcttgttaagcataagcacgcattcttgtgcttgtttctgttaccttctcttgcaacagttgcttactttaatatggtctacatgcctgctagctgggtgatgcgtatcatgacatggcttgaattggctgacactagcttgtctggttataggcttaaggattgtgttatgtatgcttcagctttagttttgcttattctcatgacagctcgcactgtttatgatgatgctgctagacgtgtttggacactgatgaatgtcattacacttgtttacaaagtctactatggtaatgctttagatcaagctatttccatgtgggccttagttatttctgtaacctctaactattctggtgtcgttacgactatcatgtttttagctagagctatagtgtttgtgtgtgttgagtattacccattgttatttattactggcaacaccttacagtgtatcatgcttgtttattgtttcttaggctattgttgctgctgctactttggccttttctgtttactcaaccgttacttcaggcttactcttggtgtttatgactacttggtctctacacaagaatttaggtatatgaactcccaggggcttttgcctcctaagagtagtattgatgctttcaagcttaacattaagttgttgggtattggaggtaaaccatgtatcaaggttgctactgtacagtctaaaatgtctgacgtaaagtgcacatctgtggtactgctctcggttcttcaacaacttagagtagagtcatcttctaaattgtgggcacaatgtgtacaactccacaatgatattcttcttgcaaaagacacaactgaagctttcgagaagatggtttctcttttgtctgttttgctatccatgcagggtgctgtagactttaataggttgtgcgaggaaatgctcgataaccgtgctactcttcaggctattgcttcagaatttagttctttaccatcatatgccgcttatgccactgcccaggaggcctatgagcaggctgtagctaatggtgattctgaagtcgttctcaaaaagttaaagaaatctttgaatgtggctaaatctgagtttgaccgtgatgctgccatgcaacgcaagttggaaaagatggcagatcaggctatgacccaaatgtacaaacaggcaagatctgaggacaagagggcaaaagtaactagtgctatgcaaacaatgctcttcactatgcttaggaagcttgataatgatgcacttaacaacattatcaacaatgcgcgtgatggttgtgttccactcaacatcataccattgactacagcagccaaactcatggttgttgtccctgattatggtacctacaagaacacttgtgatggtaacacctttacatatgcatctgcactctgggaaatccagcaagttgttgatgcggatagcaagattgttcaacttagtgaaattaacatggacaattcaccaaatttggcttggcctcttattgttacagctctaagagccaactcagctgttaaactacagaataatgaactgagtccagtagcactacgacagatgtcctgtgcggctggtaccacacaaacagcttgtactgatgacaatgcacttgcctactataacaattcgaagggaggtaggtttgtgctggcattactatcagaccaccaagatctcaaatgggctagattccctaagagtgatggtacaggtacaatttacacagaactggaaccaccttgtaggtttgttacagacacaccaaaagggcctaaagtgaaatacttgtacttcatcaaaggcttaaacaacctaaatagaggtatggtgctgggcagtttagctgctacagtacgtcttcaggctggaaatgctacagaagtacctgccaattcaactgtgctttccttctgtgcttttgcagtagaccctgctaaagcatataaggattacctagcaagtggaggacaaccaatcaccaactgtgtgaagatgttgtgtacacacactggtacaggacaggcaattactgtaacaccagaagctaacatggaccaagagtcctttggtggtgcttcatgttgtctgtattgtagatgccacattgaccatccaaatcctaaaggattctgtgacttgaaaggtaagtacgtccaaatacctaccacttgtgctaatgacccagtgggttttacacttagaaacacagtctgtaccgtctgcggaatgtggaaaggttatggctgtagttgtgaccaactccgcgaacccttgatgcagtctgcggatgcatcaacgtttttaaacgggtttgcggtgtaagtgcagcccgtcttacaccgtgcggcacaggcactagtactgatgtcgtctacagggcttttgatatttacaacgaaaaagttgctggttttgcaaagttcctaaaaactaattgctgtcgcttccaggagaaggatgaggaaggcaatttattagactcttactttgtagttaagaggcatactatgtctaactaccaacatgaagagactatttataacttggttaaagattgtccagcggttgctgtccatgactttttcaagtttagagtagatggtgacatggtaccacatatatcacgtcagcgtctaactaaatacacaatggctgatttagtctatgctctacgtcattttgatgagggtaattgtgatacattaaaagaaatactcgtcacatacaattgctgtgatgatgattatttcaataagaaggattggtatgacttcgtagagaatcctgacatcttacgcgtatatgctaacttaggtgagcgtgtacgccaatcattattaaagactgtacaattctgcgatgctatgcgtgatgcaggcattgtaggcgtactgacattagataatcaggatcttaatgggaactggtacgatttcggtgatttcgtacaagtagcaccaggctgcggagttcctattgtggattcatattactcattgctgatgcccatcctcactttgactagggcattggctgctgagtcccatatggatgctgatctcgcaaaaccacttattaagtgggatttgctgaaatatgattttacggaagagagactttgtctcttcgaccgttattttaaatattgggaccagacataccatcccaattgtattaactgtttggatgataggtgtatccttcattgtgcaaactttaatgtgttattttctactgtgtttccacctacaagttttggaccactagtaagaaaaatatttgtagatggtgttccttttgttgtttcaactggataccattttcgtgagttaggagtcgtacataatcaggatgtaaacttacatagctcgcgtctcagtttcaaggaacttttagtgtatgctgctgatccagctatgcatgcagcttctggcaatttattgctagataaacgcactacatgcttttcagtagctgcactaacaaacaatgttgcttttcaaactgtcaaacccggtaattttaataaagacttttatgactttgctgtgtctaaaggtttctttaaggaaggaagttctgttgaactaaaacacttcttctttgctcaggatggcaacgctgctatcagtgattatgactattatcgttataatctgccaacaatgtgtgatatcagacaactcctattcgtagttgaagttgttgataaatactttgattgttacgatggtggctgtattaatgccaaccaagtaatcgttaacaatctggataaatcagctggtttcccatttaataaatggggtaaggctagactttattatgactcaatgagttatgaggatcaagatgcacttttcgcgtatactaagcgtaatgtcatccctactataactcaaatgaatcttaagtatgccattagtgcaaagaatagagctcgcaccgtagctggtgtctctatctgtagtactatgacaaatagacagtttcatcagaaattattgaagtcaatagccgccactagaggagctactgtggtaattggaacaagcaagttttacggtggctggcataatatgttaaaaactgtttacagtgatgtagaaactccacaccttatgggttgggattatccaaaatgtgacagagccatgcctaacatgcttaggataatggcctctcttgttcttgctcgcaaacataacacttgctgtaacttatcacaccgtttctacaggttagctaacgagtgtgcgcaagtattaagtgagatggtcatgtgtggcggctcactatatgttaaaccaggtggaacatcatccggtgatgctacaactgcttatgctaatagtgtctttaacatttgtcaagctgttacagccaatgtaaatgcacttctttcaactgatggtaataagatagctgacaagtatgtccgcaatctacaacacaggctctatgagtgtctctatagaaatagggatgttgatcatgaattcgtggatgagttttacgcttacctgcgtaaacatttctccatgatgattctttctgatgatgccgttgtgtgctataacagtaactatgcggctcaaggtttagtagctagcattaagaactttaaggcagttctttattatcaaaataatgtgttcatgtctgaggcaaaatgttggactgagactgaccttactaaaggacctcacgaattttgctcacagcatacaatgctagttaaacaaggagatgattacgtgtacctgccttacccagatccatcaagaatattaggcgcaggctgttttgtcgatgatattgtcaaaacagatggtacacttatgattgaaaggttcgtgtcactggctattgatgcttacccacttacaaaacatcctaatcaggagtatgctgatgtctttcacttgtatttacaatacattagaaagttacatgatgagcttactggccacatgttggacatgtattccgtaatgctaactaatgataacacctcacggtactgggaacctgagttttatgaggctatgtacacaccacatacagtcttgcaggctgtaggtgcttgtgtattgtgcaattcacagacttcacttcgttgcggtgcctgtattaggagaccattcctatgttgcaagtgctgctatgaccatgtcatttcaacatcacacaaattagtgttgtctgttaatccctatgtttgcaatgccccaggttgtgatgtcactgatgtgacacaactgtatctaggaggtatgagctattattgcaagtcacataagcctcccattagttttccattatgtgctaatggtcaggtttttggtttatacaaaaacacatgtgtaggcagtgacaatgtcactgacttcaatgcgatagcaacatgtgattggactaatgctggcgattacatacttgccaacacttgtactgagagactcaagcttttcgcagcagaaacgctcaaagccactgaggaaacatttaagctgtcatatggtattgccactgtacgcgaagtactctctgacagagaattgcatctttcatgggaggttggaaaacctagaccaccattgaacagaaactatgtctttactggttaccgtgtaactaaaaatagtaaagtacagattggagagtacacctttgaaaaaggtgactatggtgatgctgttgtgtacagaggtactacgacatacaagttgaatgttggtgattactttgtgttgacatctcacactgtaatgccacttagtgcacctactctagtgccacaagagcactatgtgagaattactggcttgtacccaacactcaacatctcagatgagttttctagcaatgttgcaaattatcaaaaggtcggcatgcaaaagtactctacactccaaggaccacctggtactggtaagagtcattttgccatcggacttgctctctattacccatctgctcgcatagtgtatacggcatgctctcatgcagctgttgatgccctatgtgaaaaggcattaaaatatttgcccatagataaatgtagtagaatcatacctgcgcgtgcgcgcgtagagtgttttgataaattcaaagtgaattcaacactagaacagtatgttttctgcactgtaaatgcattgccagaaacaactgctgacattgtagtctttgatgaaatctctatggctactaattatgacttgagtgttgtcaatgctagacttcgtgcaaaacactacgtctatattggcgatcctgctcaattaccagccccccgcacattgctgactaaaggcacactagaaccagaatattttaattcagtgtgcagacttatgaaaacaataggtccagacatgttccttggaacttgtcgccgttgtcctgctgaaattgttgacactgtgagtgctttagtttatgacaataagctaaaagcacacaaggagaagtcagctcaatgcttcaaaatgttctacaaaggtgttattacacatgatgtttcatctgcaatcaacagacctcaaataggcgttgtaagagaatttcttacacgcaatcctgcttggagaaaagctgtttttatctcaccttataattcacagaacgctgtagcttcaaaaatcttaggattgcctacgcagactgttgattcatcacagggttctgaatatgactatgttatattcacacaaactactgaaacagcacactcttgtaatgtcaaccgcttcaatgtggctatcacaagggcaaaaattggcattttgtgcataatgtctgatagagatctttatgacaaactgcaatttacaagtctagaaataccacgtcgcaatgtggctacattacaagcagaaaatgtaactggactttttaaggactgtagtaagatcattactggtcttcatcctacacaggcacctacacacctcagcgttgatataaagttcaagactgaaggattatgtgttgacataccaggcataccaaaggacatgacctaccgtagactcatctctatgatgggtttcaaaatgaattaccaagtcaatggttaccctaatatgtttatcacccgcgaagaagctattcgtcacgttcgtgcgtggattggctttgatgtagagggctgtcatgcaactagagatgctgtgggtactaacctacctctccagctaggattttctacaggtgttaacttagtagctgtaccgactggttatgttgacactgaaaataacacagaattcaccagagttaatgcaaaacctccaccaggtgaccagtttaaacatcttataccactcatgtataaaggcttgccctggaatgtagtgcgtattaagatagtacaaatgctcagtgatacactgaaaggattgtcagacagagtcgtgttcgtcctttgggcgcatggctttgagcttacatcaatgaagtactttgtcaagattggacctgaaagaacgtgttgtctgtgtgacaaacgtgcaacttgcttttctacttcatcagatacttatgcctgctggaatcattctgtgggttttgactatgtctataacccatttatgattgatgttcagcagtggggctttacgggtaaccttcagagtaaccatgaccaacattgccaggtacatggaaatgcacatgtggctagttgtgatgctatcatgactagatgtttagcagtccatgagtgctttgttaagcgcgttgattggtctgttgaataccctattataggagatgaactgagggttaattctgcttgcagaaaagtacaacacatggttgtgaagtctgcattgcttgctgataagtttccagttcttcatgacattggaaatccaaaggctatcaagtgtgtgcctcaggctgaagtagaatggaagttctacgatgctcagccatgtagtgacaaagcttacaaaatagaggaactcttctattcttatgctacacatcacgataaattcactgatggtgtttgtttgttttggaattgtaacgttgatcgttacccagccaatgcaattgtgtgtaggtttgacacaagagtcttgtcaaacttgaacttaccaggctgtgatggtggtagtttgtatgtgaataagcatgcattccacactccagctttcgataaaagtgcatttactaatttaaagcaattgcctttcttttactattctgatagtccttgtgagtctcatggcaaacaagtagtgtcggatattgattatgttccactcaaatctgctacgtgtattacacgatgcaatttaggtggtgctgtttgcagacaccatgcaaatgagtaccgacagtacttggatgcatataatatgatgatttctgctggatttagcctatggatttacaaacaatttgatacttataacctgtggaatacatttaccaggttacagagtttagaaaatgtggcttataatgttgttaataaaggacactttgatggacacgccggcgaagcacctgtttccatcattaataatgctgtttacacaaaggtagatggtattgatgtggagatctttgaaaataagacaacacttcctgttaatgttgcatttgagctttgggctaagcgtaacattaaaccagtgccagagattaagatactcaataatttgggtgttgatatcgctgctaatactgtaatctgggactacaaaagagaagccccagcacatgtgtctacaataggtgtctgcacaatgactgacattgccaagaaacctactgagagtgcttgttcttcacttactgtcttgtttgatggtagagtggaaggacaggtagacctttttagaaacgcccgtaatggtgttttaataacagaaggttcagtcaaaggtctaacaccttcaaagggaccagcacaagctagcgtcaatggagtcacattaattggagaatcagtaaaaacacagtttaactactttaagaaagtagacggcattattcaacagttgcctgaaacctactttactcagagcagagacttagaggattttaagcccagatcacaaatggaaactgactttctcgagctcgctatggatgaattcatacagcgatataagctcgagggctatgccttcgaacacatcgtttatggagatttcagtcatggacaacttggcggtcttcatttaatgataggcttagccaagcgctcacaagattcaccacttaaattagaggattttatccctatggacagcacagtgaaaaattacttcataacagatgcgcaaacaggttcatcaaaatgtgtgtgttctgtgattgatcttttacttgatgactttgtcgagataataaagtcacaagatttgtcagtgatttcaaaagtggtcaaggttacaattgactatgctgaaatttcattcatgctttggtgtaaggatggacatgttgaaaccttctacccaaaactacaagcaagtcaagcgtggcaaccaggtgttgcgatgcctaacttgtacaagatgcaaagaatgcttcttgaaaagtgtgaccttcagaattatggtgaaaatgctgttataccaaaaggaataatgatgaatgtcgcaaagtatactcaactgtgtcaatacttaaatacacttactttagctgtaccctacaacctgagagttattcactttggtgctggctctgataaaggagttgcaccaggtacagctgtgctcagacaatggttgcccactggcacactacttgtcgattcagatcttaatgacttcgtctccgacgcagattctactttaattggagactgtgcaacagtacatacggctaataaatgggaccttattattagcgatatgtatgaccctaggaccaaacatgtgacaaaagagaatgactctaaagaagggtttttcacttatctgtgtggatttataaagcaaaaactagccctgggtggttctatagctgtaaagataacagagcattcttggaatgctgacctttacaagcttatgggccatttctcatggtggacagcttttgttacaaatgtaaatgcatcatcatcggaagcatttttaattggggctaactatcttggcaagccgaaggaacaaattgatggctataccatgcatgctaactacattttctggaggaacacaaatcctatccagttgtcttcctattcactctttgacatgagcaaatttcctcttaaattaagaggaactgctgtaatgtctcttaaggagaatcaaatcaatgatatgatttattctcttctggaaaaaggtaggcttatcattagagaaaacaacagagttgtggtttcaagtgatattcttgttaacaactaaacaaacatgtttattttcttattatttcttactctcactagtggtagtgaccttgaccggtgcaccacttttgatgatgttcaagctcctaattacactcaacatacttcatctatgaggggggtttactatcctgatgaaatttttagatccgacactctttatttaactcaggatttatttcttccattttattctaatgttacagggtttcatactattaatcatacgtttgacaaccctgtcataccttttaaggatggtatttattttgctgccacagagaaatcaaatgttgtccgtggttgggtttttggttctaccatgaacaacaagtcacagtcggtgattattattaacaattctactaatgttgttatacgagcatgtaactttgaattgtgtgacaaccctttctttgctgtttctaaacccatgggtacacagacacatactatgatattcgataatgcatttaattgcactttcgagtacatatctgatgccttttcgcttgatgtttcagaaaagtcaggtaattttaaacacttacgagagtttgtgtttaaaaataaagatgggtttctctatgtttataagggctatcaacctatagatgtagttcgtgatctaccttctggttttaacactttgaaacctatttttaagttgcctcttggtattaacattacaaattttagagccattcttacagccttttcacctgctcaagacacttggggcacgtcagctgcagcctattttgttggctatttaaagccaactacatttatgctcaagtatgatgaaaatggtacaatcacagatgctgttgattgttctcaaaatccacttgctgaactcaaatgctctgttaagagctttgagattgacaaaggaatttaccagacctctaatttcagggttgttccctcaagagatgttgtgagattccctaatattacaaacttgtgtccttttggagaggtttttaatgctactaaattcccttctgtctatgcatgggagaggaaaaaaatttctaattgtgttgctgattactctgtgctctacaactcaacatttttttcaacctttaagtgctatggcgtttctgccactaagttgaatgatctttgcttctccaatgtctatgcagattcttttgtagtcaagggagatgatgtaagacaaatagcgccaggacaaactggtgttattgctgattataattataaattgccagatgatttcatgggttgtgtccttgcttggaatactaggaacattgatgctacttcaactggtaattataattataaatataggtatcttagacatggcaagcttaggccctttgagagagacatatctaatgtgcctttctcccctgatggcaaaccttgcaccccacctgctcttaattgttattggccattaaatgattatggtttttacaccactactggcattggctaccaaccttacagagttgtagtactttcttttgaacttttaaatgcaccggccacggtttgtggaccaaaattatccactgaccttattaagaaccagtgtgtcaattttaattttaatggactcactggtactggtgtgttaactccttcttcaaagagatttcaaccatttcaacaatttggccgtgatgtttctgatttcactgattccgttcgagatcctaaaacatctgaaatattagacatttcaccttgctcttttgggggtgtaagtgtaattacacctggaacaaatgcttcatctgaagttgctgttctatatcaagatgttaactgcactgatgtttctacagcaattcatgcagatcaactcacaccagcttggcgcatatattctactggaaacaatgtattccagactcaagcaggctgtcttataggagctgagcatgtcgacacttcttatgagtgcgacattcctattggagctggcatttgtgctagttaccatacagtttctttattacgtagtactagccaaaaatctattgtggcttatactatgtctttaggtgctgatagttcaattgcttactctaataacaccattgctatacctactaacttttcaattagcattactacagaagtaatgcctgtttctatggctaaaacctccgtagattgtaatatgtacatctgcggagattctactgaatgtgctaatttgcttctccaatatggtagcttttgcacacaactaaatcgtgcactctcaggtattgctgctgaacaggatcgcaacacacgtgaagtgttcgctcaagtcaaacaaatgtacaaaaccccaactttgaaatattttggtggttttaatttttcacaaatattacctgaccctctaaagccaactaagaggtcttttattgaggacttgctctttaataaggtgacactcgctgatgctggcttcatgaagcaatatggcgaatgcctaggtgatattaatgctagagatctcatttgtgcgcagaagttcaatggacttacagtgttgccacctctgctcactgatgatatgattgctgcctacactgctgctctagttagtggtactgccactgctggatggacatttggtgctggcgctgctcttcaaataccttttgctatgcaaatggcatataggttcaatggcattggagttacccaaaatgttctctatgagaaccaaaaacaaatcgccaaccaatttaacaaggcgattagtcaaattcaagaatcacttacaacaacatcaactgcattgggcaagctgcaagacgttgttaaccagaatgctcaagcattaaacacacttgttaaacaacttagctctaattttggtgcaatttcaagtgtgctaaatgatatcctttcgcgacttgataaagtcgaggcggaggtacaaattgacaggttaattacaggcagacttcaaagccttcaaacctatgtaacacaacaactaatcagggctgctgaaatcagggcttctgctaatcttgctgctactaaaatgtctgagtgtgttcttggacaatcaaaaagagttgacttttgtggaaagggctaccaccttatgtccttcccacaagcagccccgcatggtgttgtcttcctacatgtcacgtatgtgccatcccaggagaggaacttcaccacagcgccagcaatttgtcatgaaggcaaagcatacttccctcgtgaaggtgtttttgtgtttaatggcacttcttggtttattacacagaggaacttcttttctccacaaataattactacagacaatacatttgtctcaggaaattgtgatgtcgttattggcatcattaacaacacagtttatgatcctctgcaacctgagcttgactcattcaaagaagagctggacaagtacttcaaaaatcatacatcaccagatgttgatcttggcgacatttcaggcattaacgcttctgtcgtcaacattcaaaaagaaattgaccgcctcaatgaggtcgctaaaaatttaaatgaatcactcattgaccttcaagaattgggaaaatatgagcaatatattaaatggccttggtatgtttggctcggcttcattgctggactaattgccatcgtcatggttacaatcttgctttgttgcatgactagttgttgcagttgcctcaagggtgcatgctcttgtggttcttgctgcaagtttgatgaggatgactctgagccagttctcaagggtgtcaaattacattacacataaacgaacttatggatttgtttatgagattttttactcttgaatcaattactgcacagccagtaaaaattgacaatgcttctcctgcaagtactgttcatgctacagcaacgataccgctacaagcctcactccctttcggatggcttgttattggcgttgcatttcttgctgtttttcagagcgctaccaaaataattgcgctcaataaaagatggcagctagccctttataagggcttccagttcatttgcaatttactgctgctatttgttaccatctattcacatcttttgcttgtcgctgcaggtatggaggcgcaatttttgtacctctatgccttgatatattttctacaatgcatcaacgcatgtagaattattatgagatgttggctttgttggaagtgcaaatccaagaacccattactttatgatgccaactactttgtttgctggcacacacataactatgactactgtataccatataacagtgtcacagatacaattgtcgttactgaaggtgacggcatttcaacaccaaaactcaaagaagactaccaaattggtggttattctgaggataggcactcaggtgttaaagactatgtcgttgtacatggctatttcaccgaagtttactaccagcttgagtctacacaaattactacagacactggtattgaaaatgctacattcttcatctttaacaagcttgttaaagatccaccgaatgtgcaaatacacacaatcgacggctcttcaggagttgctaatccagcaatggatccaatttatgatgagccgacgacgactactagcgtgcctttgtaagcacaagaaagtgagtacgaacttatgtactcattcgtttcggaagaaacaggtacgttaatagttaatagcgtacttctttttcttgctttcgtggtattcttgctagtcacactagccatccttactgcgcttcgattgtgtgcgtactgctgcaatattgttaacgtgagtttagtaaaaccaacggtttacgtctactcgcgtgttaaaaatctgaactcttctgaaggagttcctgatcttctggtctaaacgaactaactattattattattctgtttggaactttaacattgcttatcatggcagacaacggtactattaccgttgaggagcttaaacaactcctggaacaatggaacctagtaataggtttcctattcctagcctggattatgttactacaatttgcctattctaatcggaacaggtttttgtacataataaagcttgttttcctctggctcttgtggccagtaacacttgcttgttttgtgcttgctgctgtctacagaattaattgggtgactggcgggattgcgattgcaatggcttgtattgtaggcttgatgtggcttagctacttcgttgcttccttcaggctgtttgctcgtacccgctcaatgtggtcattcaacccagaaacaaacattcttctcaatgtgcctctccgggggacaattgtgaccagaccgctcatggaaagtgaacttgtcattggtgctgtgatcattcgtggtcacttgcgaatggccggacactccctagggcgctgtgacattaaggacctgccaaaagagatcactgtggctacatcacgaacgctttcttattacaaattaggagcgtcgcagcgtgtaggcactgattcaggttttgctgcatacaaccgctaccgtattggaaactataaattaaatacagaccacgccggtagcaacgacaatattgctttgctagtacagtaagtgacaacagatgtttcatcttgttgacttccaggttacaatagcagagatattgattatcattatgaggactttcaggattgctatttggaatcttgacgttataataagttcaatagtgagacaattatttaagcctctaactaagaagaattattcggagttagatgatgaagaacttatggagttagattatccataaaacgaacatgaaaattattctcttcctgacattgattgtatttacatcttgcgagctatatcactatcaggagtgtgttagaggtacgactgtactactaaaagaaccttgcccatcaggaacatacgagggcaattcaccatttcaccctcttgctgacaataaatttgcactaacttgcactagcacacactttgcttttgcttgtgctgacggtactcgacatacctatcagctgcgtgcaagatcagtttcaccaaaacttttcatcagacaagaggaggttcaacaagagctctactcgccactttttctcattgttgctgctctagtatttttaatactttgcttcaccattaagagaaagacagaatgaatgagctcactttaattgacttctatttgtgctttttagcctttctgctattccttgttttaataatgcttattatattttggttttcactcgaaatccaggatctagaagaaccttgtaccaaagtctaaacgaacatgaaacttctcattgttttgacttgtatttctctatgcagttgcatacgcactgtagtacagcgctgtgcatctaataaacctcatgtgcttgaagatccttgtaaggtacaacactaggggtaatacttatagcactgcttggctttgtgctctaggaaaggttttaccttttcatagatggcacactatggttcaaacatgcacacctaatgttactatcaactgtcaagatccagctggtggtgcgcttatagctaggtgttggtaccttcatgaaggtcaccaaactgctgcatttagagacgtacttgttgttttaaataaacgaacaaattaaaatgtctgataatggaccccaatcaaaccaacgtagtgccccccgcattacatttggtggacccacagattcaactgacaataaccagaatggaggacgcaatggggcaaggccaaaacagcgccgaccccaaggtttacccaataatactgcgtcttggttcacagctctcactcagcatggcaaggaggaacttagattccctcgaggccagggcgttccaatcaacaccaatagtggtccagatgaccaaattggctactaccgaagagctacccgacgagttcgtggtggtgacggcaaaatgaaagagctcagccccagatggtacttctattacctaggaactggcccagaagcttcacttccctacggcgctaacaaagaaggcatcgtatgggttgcaactgagggagccttgaatacacccaaagaccacattggcacccgcaatcctaataacaatgctgccaccgtgctacaacttcctcaaggaacaacattgccaaaaggcttctacgcagagggaagcagaggcggcagtcaagcctcttctcgctcctcatcacgtagtcgcggtaattcaagaaattcaactcctggcagcagtaggggaaattctcctgctcgaatggctagcggaggtggtgaaactgccctcgcgctattgctgctagacagattgaaccagcttgagagcaaagtttctggtaaaggccaacaacaacaaggccaaactgtcactaagaaatctgctgctgaggcatctaaaaagcctcgccaaaaacgtactgccacaaaacagtacaacgtcactcaagcatttgggagacgtggtccagaacaaacccaaggaaatttcggggaccaagacctaatcagacaaggaactgattacaaacattggccgcaaattgcacaatttgctccaagtgcctctgcattctttggaatgtcacgcattggcatggaagtcacaccttcgggaacatggctgacttatcatggagccattaaattggatgacaaagatccacaattcaaagacaacgtcatactgctgaacaagcacattgacgcatacaaaacattcccaccaacagagcctaaaaaggacaaaaagaaaaagactgatgaagctcagcctttgccgcagagacaaaagaagcagcccactgtgactcttcttcctgcggctgacatggatgatttctccagacaacttcaaaattccatgagtggagcttctgctgattcaactcaggcataaacactcatgatgaccacacaaggcagatgggctatgtaaacgttttcgcaattccgtttacgatacatagtctactcttgtgcagaatgaattctcgtaactaaacagcacaagtaggtttagttaactttaatctcacatagcaatctttaatcaatgtgtaacattagggaggacttgaaagagccaccacattttcatcgaggccacgcggagtacgatcgagggtacagtgaataatgctagggagagctgcctatatggaagagccctaatgtgtaaaattaattttagtagtgctatccccatgtgattttaatagcttcttaggagaatgacaaaaaaaaaaaaaaaaaa

SEQ ID NO: 49 - DNA, 29430 bp, Coronavirus
  misc_feature 6464-6563, 11343-11442, 22567-22666: n = A,T,C or G
tacccaggaaaagccaaccaacctcgatctcttgtagatctgttctctaaacgaactttaaaatctgtgtagctgtcgctcggctgcatgcctagtgcacctacgcagtataaacaataataaattttactgtcgttgacaagaaacgagtaactcgtccctcttctgcagactgcttacggtttcgtccgtgttgcagtcgatcatcagcatacctaggtttcgtccgggtgtgaccgaaaggtaagatggagagccttgttcttggtgtcaacgagaaaacacacgtccaactcagtttgcctgtccttcaggttagagacgtgctagtgcgtggcttcggggactctgtggaagaggccctatcggaggcacgtgaacacctcaaaaatggcacttgtggtctagtagagctggaaaaaggcgtactgccccagcttgaacagccctatgtgttcattaaacgttctgatgccttaagcaccaatcacggccacaaggtcgttgagctggttgcagaaatggacggcattcagtacggtcgtagcggtataacactgggagtactcgtgccacatgtgggcgaaaccccaattgcataccgcaatgttcttcttcgtaagaacggtaataagggagccggtggtcatagctatggcatcgatctaaagtcttatgacttaggtgacgagcttggcactgatcccattgaagattatgaacaaaactggaacactaagcatggcagtggtgcactccgtgaactcactcgtgagctcaatggaggtgcagtcactcgctatgtcgacaacaatttctgtggcccagatgggtaccctcttgattgcatcaaagattttctcgcacgcgcgggcaagtcaatgtgcactctttccgaacaacttgattacatcgagtcgaagagaggtgtctactgctgccgtgaccatgagcatgaaattgcctggttcactgagcgctctgataagagctacgagcaccagacacccttcgaaattaagagtgccaagaaatttgacactttcaaaggggaatgcccaaagtttgtgtttcctcttaactcaaaagtcaaagtcattcaaccacgtgttgaaaagaaaaagactgagggtttcatggggcgtatacgctctgtgtaccctgttgcatctccacaggagtgtaacaatatgcacttgtctaccttgatgaaatgtaatcattgcgatgaagtttcatggcagacgtgcgactttctgaaagccacttgtgaacattgtggcactgaaaatttagttattgaaggacctactacatgtgggtacctacctactaatgctgtagtgaaaatgccatgtcctgcctgtcaagacccagagattggacctgagcatagtgttgcagattatcacaaccactcaaacattgaaactcgactccgcaagggaggtaggactagatgttttggaggctgtgtgtttgcctatgttggctgctataataagcgtgcctactgggttcctcgtgctagtgctgatattggctcaggccatactggcattactggtgacaatgtggagaccttgaatgaggatctccttgagatactgagtcgtgaacgtgttaacattaacattgttggcgattttcatttgaatgaagaggttgccatcattttggcatctttctctgcttctacaagtgcctttattgacactataaagagtcttgattacaagtctttcaaaaccattgttgagtcctgcggtaactataaagttaccaagggaaagcccgtaaaaggtgcttggaacattggacaacagagatcagttttaacaccactgtgtggttttccctcacaggctgctggtgttatcagatcaatttttgcgcgcacacttgatgcagcaaaccactcaattcctgatttgcaaagagcagctgtcaccatacttgatggtatttctgaacagtcattacgtcttgtcgacgccatggtttatacttcagacctgctcaccaacagtgtcattattatggcatatgtaactggtggtcttgtacaacagacttctcagtggttgtctaatcttttgggcactactgttgaaaaactcaggcctatctttgaatggattgaggcgaaacttagtgcaggagttgaatttctcaaggatgcttgggagattctcaaatttctcattacaggtgtttttgacatcgtcaagggtcaaatacaggttgcttcagataacatcaaggattgtgtaaaatgcttcattgatgttgttaacaaggcactcgaaatgtgcattgatcaagtcactatcgctggcgcaaagttgcgatcactcaacttaggtgaagtcttcatcgctcaaagcaagggactttaccgtcagtgtatacgtggcaaggagcagctgcaactactcatgcctcttaaggcaccaaaagaagtaacctttcttgaaggtgattcacatgacacagtacttacctctgaggaggttgttctcaagaacggtgaactcgaagcactcgagacgcccgttgatagcttcacaaatggagctatcgttggcacaccagtctgtgtaaatggcctcatgctcttagagattaaggacaaagaacaatactgcgcattgtctcctggtttactggctacaaacaatgtctttcgcttaaaagggggtgcaccaattaaaggtgtaacctttggagaagatactgtttgggaagttcaaggttacaagaatgtgagaatcacatttgagcttgatgaacgtgttgacaaagtgcttaatgaaaagtgctctgtctacactgttgaatccggtaccgaagttactgagtttgcatgtgttgtagcagagggctgttgtgaagactttacaaccagtttctgatctccttaccaacatgggtattgatcttgatgagtggagtgtagctacattctacttatttgatgatgctggtgaagaaaacttttcatcacgtatgtattgttccttttaccctccagatgaggaagaagaggacgatgcagagtgtgaggaagaagaaattgatgaaacctgtgaacatgagtacggtacagaggatgattatcaaggtctccctctggaatttggtgcctcagctgaaacagttcgagttgaggaagaagaagaggaagactggctggatgatactactgagcaatcagagattgagccagaaccagaacctacacctgaagaaccagttaatcagtttactggttatttaaaacttactgacaatgttgccattaaatgtgttgacatcgttaaggaggcacaaagtgctaatcctatggtgattgtaaatgctgctaacatacacctgaaacatggtggtggtgtagcaggtgcactcaacaaggcaaccaatggtgccatgcaaaaggagagtgatgattacattaagctaaatggccctcttacagtaggagggtcttgtttgctttctggacataatcttgctaagaagtgtctgcatgttgttggacctaacctaaatgcaggtgaggacatccagcttcttaaggcagcatatgaaaatttcaattcacaggacatcttacttgcaccattgttgtcagcaggcatatttggtgctaaaccacttcagtctttacaagtgtgcgtgcagacggttcgtacacaggtttatattgcagtcaatgacaaagctctttatgagcaggttgtcatggattatcttgataacctgaagcctagagtggaagcacctaaacaagaggagccaccaaacacagaagattccaaaactgaggagaaatctgtcgtacagaagcctgtcgatgtgaagccaaaaattaaggcctgcattgatgaggttaccacaacactggaagaaactaagtttcttaccaataagttactcttgtttgctgatatcaatggtaagctttaccatgattctcagaacatgcttagaggtgaagatatgtctttccttgagaaggatgcaccttacatggtaggtgatgttatcactagtggtgatatcacttgtgttgtaataccctccaaaaaggctggtggcactactgagatgctctcaagagctttgaagaaagtgccagttgatgagtatataaccacgtaccctggacaaggatgtgctggttatacacttgaggaagctaagactgctcttaagaaatgcaaatctgcattttatgtactaccttcagaagcacctaatgctaaggaagagattctaggaactgtatcctggaatttgagagaaatgcttgctcatgctgaagagacaagaaaattaatgcctatatgcatggatgttagagccataatggcaaccatccaacgtaagtataaaggaattaaaattcaagagggcatcgttgactatggtgtccgattcttcttttatactagtaaagagcctgtagcttctattattacgaagctgaactctctaaatgagccgcttgtcacaatgccaattggttatgtgacacatggttttaatcttgaagaggctgcgcgctgtatgcgttctcttaaagctcctgccgtagtgtcagtatcatcaccagatgctgttactacatataatggatacctcacttcgtcatcaaagacatctgaggagcactttgtagaaacagtttctttggctggctcttacagagattggtcctattcaggacagcgtacagagttaggtgttgaatttcttaagcgtggtgacaaaattgtgtaccacactctggagagccccgtcgagtttcatcttgacggtgaggttctttcacttgacaaactaaagagtctcttatccctgcgggaggttaagactataaaagtgttcacaactgtggacaacactaatctccacacacagcttgtggataagtctatgacatatggacagcagtttggtccaacatacttggatggtgctgatgttacaaaaattaaacctcatgtaaatcatgagggtaagactttctttgtactacctagtgatgacacactacgtagtgaagctttcgagtactaccatactcttgatgagagttttcttggtaggtacatgtctgctttaaaccacacaaagaaatggaaatttcctcaagttggtggtttaacttcaattaaatgggctgataacaattgttatttgtctagtgttttattagcacttcaacagcttgaagtcaaattcaatgcaccagcacttcaagaggcttattatagagcccgtgctggtgatgctgctaacttttgtgcactcatactcgcttacagtaataaaactgttggcgagcttggtgatgtcagagaaactatgacccatcttctacagcatgctaatttggaatctgcaaagcgagttcttaatgtggtgtgtaaacattgtggtcagaaaactactaccttaacgggtgtagaagctgtgatgtatatgggtactctatcttatgataatcttaagacaggtgtttccattccatgtgtgtgtggtcgtgatgctacacaatatctagtacaacaagagtcttcttttgttatgatgtctgcaccacctgctgagtataaattacagcaggtacattcttatgtgcgaatgagtacactggtaactatcagtgtggtcattacactcatataactgctaaggagaccctctatcgtattgacggagctcaccttacaaagatgtcagagtaccaaggaccagtgactgatgttttctacaaggaaacatcttacactacaaccatcaagcctgtgtcgtataaactcgatggagttacttacacagagattgaaccaaaattggatgggtattataaaaaggataatgcttactatacagagcagcctatagaccttgtaccaactcaaccattaccaaatgcgagttttgataatttcaaactcacatgttctaacacaaaatttgctgatgatttaaatcaaatgacaggcttcacaaagccagcttcacgagagctatctgtcacattcttcccagacttgaatggcgatgtagtggctattgactatagacactattcagcgagtttcaagaaaggtgctaaattactgcataagccaattgtttggcacattaaccaggctacaaccaagacaacgttcaaaccaaacacttggtgtttacgttgtctttggagtacaaagccagtagatacttcaaattcatttgaagttctggcagtagaagacacacaaggaatggacaatcttgcttgtgaaagtcaacaacccacctctgaagaagtagtggaaaatcctaccatacagaaggaagtcatagagtgtgacgtgaaaactaccgaagttgtaggcaatgtcatacttaaaccatcagatgaaggtgttaaagtaacacaagagttaggtcatgaggatctnnnnnnnnnnnnnnnnnnnnnnnnnnnnnnnnnnnnnnnnnnnnnnnnnnnnnnnnnnnnnnnnnnnnnnnnnnnnnnnnnnnnnnnnnnnnnnnnnnnntgttgttaagtatttgcttaggttctctaatctgtgtaactgctgcttttggtgtactcttatctaattttggtgctccttcttattgtaatggcgttagagaattgtatcttaattcgtctaacgttactactatggatttctgtgaaggttcttttccttgcagcatttgtttaagtggattagactcccttgattcttatccagctcttgaaaccattcaggtgacgatttcatcgtacaagctagacttgacaattttaggtctggccgctgagtgggttttggcatatatgttgttcacaaaattcttttatttattaggtctttcagctataatgcaggtgttctttggctattttgctagtcatttcatcagcaattcttggctcatgtggtttatcattagtattgtacaaatggcacccgtttctgcaatggttaggatgtacatcttctttgcttctttctactacatatggaagagctatgttcatatcatggatggttgcacctcttcgacttgcatgatgtgctataagcgcaatcgtgccacacgcgttgagtgtacaactattgttaatggcatgaagagatctttctatgtctatgcaaatggaggccgtggcttctgcaagactcacaattggaattgtctcaattgtgacacattttgcactggtagtacattcattagtgatgaagttgctcgtgatttgtcactccagtttaaaagaccaatcaaccctactgaccagtcatcgtatattgttgatagtgttgctgtgaaaaatggcgcgcttcacctctactttgacaaggctggtcaaaagacctatgagagacatccgctctcccattttgtcaatttagacaatttgagagctaacaacactaaaggttcactgcctattaatgtcatagtttttgatggcaagtccaaatgcgacgagtctgcttctaagtctgcttctgtgtactacagtcagctgatgtgccaacctattctgttgcttgaccaagctcttgtatcagacgttggagatagtactgaagtttccgttaagatgtttgatgcttatgtcgacaccttttcagcaacttttagtgttcctatggaaaaacttaaggcacttgttgctacagctcacagcgagttagcaaagggtgtagctttagatggtgtcctttctacattcgtgtcagctgcccgacaaggtgttgttgataccgatgttgacacaaaggatgttattgaatgtctcaaactttcacatcactctgacttagaagtgacaggtgacagttgtaacaatttcatgctcacctataataaggttgaaaacatgacgcccagagatcttggcgcatgtattgactgtaatgcaaggcatatcaatgcccaagtagcaaaaagtcacaatgtttcactcatctggaatgtaaaagactacatgtctttatctgaacagctgcgtaaacaaattcgtagtgctgccaagaagaacaacataccttttagactaacttgtgctacaactagacaggttgtcaatgtcataactactaaaatctcactcaagggtggtaagattgttagtacttgttttaaacttatgcttaaggccacattattgtgcgttcttgctgcattggtttgttatatcgttatgccattacatacattgtcaatccatgatggttacacaaatgaaatcattggttacaaagccattcaggatggtgtcactcgtgacatcatttctactgatgattgttttgcaaataaacatgctggttttgacgcatggtttagccagcgtggtggttcatacaaaaatgacaaaagctgccctgtagtagctgctatcattacaagagagattggtttcatagtgcctggcttaccgggtactgtgctgagagcaatcaatggtgacttcttgcattttctacctcgtgtttttagtgctgttggcaacatttgctacacaccttccaaactcattgagtatagtgattttgctacctctgcttgcgttcttgctgctgagtgtacaatttttaaggatgctatgggcaaacctgtgccatattgttatgacactaatttgctagagggttctatttcttatagtgagcttcgtccagacactcgttatgtgcttatggatggttccatcatacagtttcctaacacttacctggagggttctgttagagtagtaacaacttttgatgctgagtactgtagacatggtacatgcgaaaggtcagaagtaggtatttgcctatctaccagtggtagatgggttcttaataatgagcattacagagctctatcaggagttttctgtggtgttgatgcgatgaatctcatagctaacatctttactcctcttgtgcaacctgtgggtgctttagatgtgtctgcttcagtagtggctggtggtattattgccatattggtgacttgtgctgcctactactttatgaaattcagacgtgcttttggtgagtacaaccatgttgttgctgctaatgcacttttgtttttgatgtctttcactatactctgtctggtaccagcttacagctttctgccgggagtctactcagtcttttacttgtacttgacattctatttcaccaatgatgtttcattcttggctcaccttcaatggtttgccatgttttctcctattgtgcctttttggataacagcaatctatgtattctgtatttctctgaagcactgccattggttctttaacaactatcttaggaaaagagtcatgtttaatggagttacatttagtaccttcgaggaggctgctttgtgtacctttttgctcaacaaggaaatgtacctaaaattgcgtagcgagacactgttgccacttacacagtataacaggtatcttgctctatataacaagtacaagtatttcagtggagtcttagatactaccagctatcgtgaagcagcttgctgccacttagcaaaggctctaaatgactttagcaactcaggtgctgatgttctctaccaaccaccacagacatcaatcacttctgctgttctgcagagtggttttaggaaaatggcattcccgtcaggcaaagttgaagggtgcatggtacaagtaacctgtggaactacaactcttaatggattgtggttggatgacacagtatactgtccaagacatgtcatttgcacagcagaagacatgcttaatcctaactatgaagatctgctcattcgcaaatccaaccatagctttcttgttcaggctggcaatgttcaacttcgtgttattggccattctatgcaaaattgtctgcttaggcttaaagttgatacttctaaccctaagacacccaagtataaatttgtccgtatccaacctggtcaaacattttcagttctagcatgctacaatggttcaccatctggtgtttatcagtgtgccatgagacctaatcataccattaaaggttctttccttaatggatcatgtggtagtgttggttttaacattgattatgattgcgtgtctttctgctatatgcatcatatggagcttccaacaggagtacacgctggtactgacttagaaggtaaattctatggtccatttgttgacagaccaactgcacaggctgcaggtacagacacaaccataacattaaatgttttggcatggctgtatgctgctgttatcaatggtgataggtggtttcttaatagattcaccactactttgaatgactttaaccttgtggcaatgaagtacaactatgaacctttgacacaagatcatgttgacatattgggacctctttctgctcaaacaggaattgccgtcttagatatgtgtgctgctttgaaagagctgctgcagaatggtatgaatggtcgtactatccttggtagcactattttagaagatgagtttacaccatttgatgttgttagacaatgctctggtgttaccttccaaggtaagttcaagaaaattgttaagggcactcatcattggatgcttttaactttcttgacatcactattgattcttgttcaaagtacacagtggtcactgtttttctttgtttacgagaatgctttcttgccatttactcttggtattatggcaattgctgcatgtgctatgctgcttgttaagcataagcacgcattcttgtgcttgtttctgttaccttctcttgcaacagttgcttactttaatatggtctacatgcctgctagctgggtgatgcgtatcatgacatggcttgaattggctgacactagcttgtctggttataggcttaaggattgtgttatgtatgcttcagctttagttttgcttattctcatgacagctcgcactgtttatgatgatgctgctagacgtgtttggacactgatgaatgtcattacacttgtttacaaagtctactatggtaatgctttagatcaagctatttccatgtgggccttagttatttctgtaacctctaactattctggtgtcgttacgactatcatgtttttagctagagctatagtgtttgtgtgtgttgagtattacccattgttatttattactggcaacaccttacagtgtatcatgcttgtttattgtttcttaggctattgttgctgctgctactttggccttttctgtttactcaaccgttacttcaggcttactcttggtgtttatgactacttggtctctacacaagaatttaggtatatgaactcccaggnnnnnnnnnnnnnnnnnnnnnnnnnnnnnnnnnnnnnnnnnnnnnnnnnnnnnnnnnnnnnnnnnnnnnnnnnnnnnnnnnnnnnnnnnnnnnnnnnnnnggtattggaggtaaaccatgtatcaaggttgctactgtacagtctaaaatgtctgacgtaaagtgcacatctgtggtactgctctcggttcttcaacaacttagagtagagtcatcttctaaattgtgggcacaatgtgtacaactccacaatgatattcttcttgcaaaagacacaactgaagctttcgagaagatggtttctcttttgtctgttttgctatccatgcagggtgctgtaaactttaataggttgtgcgaggaaatgctcgataaccgtgctactcttcaggctattgcttcagaatttagttctttaccatcatatgccgcttatgccactgcccaggaggcctatgagcaggctgtagctaatggtgattctgaagtcgttctcaaaaagttaaagaaatctttgaatgtggctaaatctgagtttgaccgtgatgctgccatgcaacgcaagttggaaaagatggcagatcaggctatgacccaaatgtacaaacaggcaagatctgaggacaagagggcaaaagtaactagtgctatgcaaacaatgctcttcactatgcttaggaagcttgataatgatgcacttaacaacattatcaacaatgcgcgtgatggttgtgttccactcaacatcataccattgactacagcagccaaactcatggttgttgtccctgattatggtacctacaagaacacttgtgatggtaacacctttacatatgcatctgcactctgggaaatccagcaagttgttgatgcggatagcaagattgttcaacttagtgaaattaacatggacaattcaccaaatttggcttggcctcttattgttacagctctaagagccaactcagctgttaaactacagaataatgaactgagtccagtagcactacgacagatgtcctgtgcggctggtaccacacaaacagcttgtactgatgacaatgcacttgcctactataacaattcgaagggaggtaggtttgtgctggcattactatcagaccaccaagatctcaaatgggctagattccctaagagtgatggtacaggtacaatttacacagaactggaaccaccttgtaggtttgttacagacacaccaaaagggcctaaagtgaaatacttgtacttcatcaaaggcttaaacaacctaaatagaggtatggtgctgggcagtttagctgctacagtacgtcttcaggctggaaatgctacagaagtacctgccaattcaactgtgctttccttctgtgcttttgcagtagaccctgctaaagcatataaggattacctagcaagtggaggacaaccaatcaccaactgtgtgaagatgttgtgtacacacactggtacaggacaggcaattactgtaacaccagaagctaacatggaccaagagtcctttggtggtgcttcatgttgtctgtattgtagatgccacattgaccatccaaatcctaaaggattctgtgacttgaaaggtaagtacgtccaaatacctaccacttgtgctaatgacccagtgggttttacacttagaaacacagtctgtaccgtctgcggaatgtggaaaggttatggctgtagttgtgaccaactccgcgaacccttgatgcagtctgcggatgcatcaacgtttttaaacgggtttgcggtgtaagtgcagcccgtcttacaccgtgcggcacaggcactagtactgatgtcgtctacagggcttttgatatttacaacgaaaaagttgctggttttgcaaagttcctaaaaactaattgctgtcgcttccaggagaaggatgaggaaggcaatttattagactcttactttgtagttaagaggcatactatgtctaactaccaacatgaagagactatttataacttggttaaagattgtccagcggttgctgtccatgactttttcaagtttagagtagatggtgacatggtaccacatatatcacgtcagcgtctaactaaatacacaatggctgatttagtctatgctctacgtcattttgatgagggtaattgtgatacattaaaagaaatactcgtcacatacaattgctgtgatgatgattatttcaataagaaggattggtatgacttcgtagagaatcctgacatcttacgcgtatatgctaacttaggtgagcgtgtacgccaatcattattaaagactgtacaattctgcgatgctatgcgtgatgcaggcattgtaggcgtactgacattagataatcaggatcttaatgggaactggtacgatttcggtgatttcgtacaagtagcaccaggctgcggagttcctattgtggattcatattactcattgctgatgcccatcctcactttgactagggcattggctgctgagtcccatatggatgctgatctcgcaaaaccacttattaagtgggatttgctgaaatatgattttacggaagagagactttgtctcttcgaccgttattttaaatattgggaccagacataccatcccaattgtattaactgtttggatgataggtgtatccttcattgtgcaaactttaatgtgttattttctactgtgtttccacctacaagttttggaccactagtaagaaaaatatttgtagatggtgttccttttgttgtttcaactggataccattttcgtgagttaggagtcgtacataatcaggatgtaaacttacatagctcgcgtctcagtttcaaggaacttttagtgtatgctgctgatccagctatgcatgcagcttctggcaatttattgctagataaacgcactacatgcttttcagtagctgcactaacaaacaatgttgcttttcaaactgtcaaacccggtaattttaataaagacttttatgactttgctgtgtctaaaggtttctttaaggaaggaagttctgttgaactaaaacacttcttctttgctcaggatggcaacgctgctatcagtgattatgactattatcgttataatctgccaacaatgtgtgatatcagacaactcctattcgtagttgaagttgttgataaatactttgattgttacgatggtggctgtattaatgccaaccaagtaatcgttaacaatctggataaatcagctggtttcccatttaataaatggggtaaggctagactttattatgactcaatgagttatgaggatcaagatgcacttttcgcgtatactaagcgtaatgtcatccctactataactcaaatgaatcttaagtatgccattagtgcaaagaatagagctcgcaccgtagctggtgtctctatctgtagtactatgacaaatagacagtttcatcagaaattattgaagtcaatagccgccactagaggagctactgtggtaattggaacaagcaagttttacggtggctggcataatatgttaaaaactgtttacagtgatgtagaaactccacaccttatgggttgggattatccaaaatgtgacagagccatgcctaacatgcttaggataatggcctctcttgttcttgctcgcaaacataacacttgctgtaacttatcacaccgtttctacaggttagctaacgagtgtgcgcaagtattaagtgagatggtcatgtgtggcggctcactatatgttaaaccaggtggaacatcatccggtgatgctacaactgcttatgctaatagtgtctttaacatttgtcaagctgttacagccaatgtaaatgcacttctttcaactgatggtaataagatagctgacaagtatgtccgcaatctacaacacaggctctatgagtgtctctatagaaatagggatgttgatcatgaattcgtggatgagttttacgcttacctgcgtaaacatttctccatgatgattctttctgatgatgccgttgtgtgctataacagtaactatgcggctcaaggtttagtagctagcattaagaactttaaggcagttctttattatcaaaataatgtgttcatgtctgaggcaaaatgttggactgagactgaccttactaaaggacctcacgaattttgctcacagcatacaatgctagttaaacaaggagatgattacgtgtacctgccttacccagatccatcaagaatattaggcgcaggctgttttgtcgatgatattgtcaaaacagatggtacacttatgattgaaaggttcgtgtcactggctattgatgcttacccacttacaaaacatcctaatcaggagtatgctgatgtctttcacttgtatttacaatacattagaaagttacatgatgagcttactggccacatgttggacatgtattccgtaatgctaactaatgataacacctcacggtactgggaacctgagttttatgaggctatgtacacaccacatacagtcttgcaggctgtaggtgcttgtgtattgtgcaattcacagacttcacttcgttgcggtgcctgtattaggagaccattcctatgttgcaagtgctgctatgaccatgtcatttcaacatcacacaaattagtgttgtctgttaatccctatgtttgcaatgccccaggttgtgatgtcactgatgtgacacaactgtatctaggaggtatgagctattattgcaagtcacataagcctcccattagttttccattatgtgctaatggtcaggtttttggtttatacaaaaacacatgtgtaggcagtgacaatgtcactgacttcaatgcgatagcaacatgtgattggactaatgctggcgattacatacttgccaacacttgtactgagagactcaagcttttcgcagcagaaacgctcaaagccactgaggaaacatttaagctgtcatatggtattgccactgtacgcgaagtactctctgacagagaattgcatctttcatgggaggttggaaaacctagaccaccattgaacagaaactatgtctttactggttaccgtgtaactaaaaatagtaaagtacagattggagagtacacctttgaaaaaggtgactatggtgatgctgttgtgtacagaggtactacgacatacaagttgaatgttggtgattactttgtgttgacatctcacactgtaatgccacttagtgcacctactctagtgccacaagagcactatgtgagaattactggcttgtacccaacactcaacatctcagatgagttttctagcaatgttgcaaattatcaaaaggtcggcatgcaaaagtactctacactccaaggaccacctggtactggtaagagtcattttgccatcggacttgctctctattacccatctgctcgcatagtgtatacggcatgctctcatgcagctgttgatgccctatgtgaaaaggcattaaaatatttgcccatagataaatgtagtagaatcatacctgcgcgtgcgcgcgtagagtgttttgataaattcaaagtgaattcaacactagaacagtatgttttctgcactgtaaatgcattgccagaaacaactgctgacattgtagtctttgatgaaatctctatggctactaattatgacttgagtgttgtcaatgctagacttcgtgcaaaacactacgtctatattggcgatcctgctcaattaccagccccccgcacattgctgactaaaggcacactagaaccagaatattttaattcagtgtgcagacttatgaaaacaataggtccagacatgttccttggaacttgtcgccgttgtcctgctgaaattgttgacactgtgagtgctttagtttatgacaataagctaaaagcacacaaggagaagtcagctcaatgcttcaaaatgttctacaaaggtgttattacacatgatgtttcatctgcaatcaacagacctcaaataggcgttgtaagagaatttcttacacgcaatcctgcttggagaaaagctgtttttatctcaccttataattcacagaacgctgtagcttcaaaaatcttaggattgcctacgcagactgttgattcatcacagggttctgaatatgactatgtcatattcacacaaactactgaaacagcacactcttgtaatgtcaaccgcttcaatgtggctatcacaagggcaaaaattggcattttgtgcataatgtctgatagagatctttatgacaaactgcaatttacaagtctagaaataccacgtcgcaatgtggctacattacaagcagaaaatgtaactggactttttaaggactgtagtaagatcattactggtcttcatcctacacaggcacctacacacctcagcgttgatataaagttcaagactgaaggattatgtgttgacataccaggcataccaaaggacatgacctaccgtagactcatctctatgatgggtttcaaaatgaattaccaagtcaatggttaccctaatatgtttatcacccgcgaagaagctattcgtcacgttcgtgcgtggattggctttgatgtagagggctgtcatgcaactagagatgctgtgggtactaacctacctctccagctaggattttctacaggtgttaacttagtagctgtaccgactggttatgttgacactgaaaataacacagaattcaccagagttaatgcaaaacctccaccaggtgaccagtttaaacatcttataccactcatgtataaaggcttgccctggaatgtagtgcgtattaagatagtacaaatgctcagtgatacactgaaaggattgtcagacagagtcgtgttcgtcctttgggcgcatggctttgagcttacatcaatgaagtactttgtcaagattggacctgaaagaacgtgttgtctgtgtgacaaacgtgcaacttgcttttctacttcatcagatacttatgcctgctggaatcattctgtgggttttgactatgtctataacccatttatgattgatgttcagcagtggggctttacgggtaaccttcagagtaaccatgaccaacattgccaggtacatggaaatgcacatgtggctagttgtgatgctatcatgactagatgtttagcagtccatgagtgctttgttaagcgcgttgattggtctgttgaataccctattataggagatgaactgagggttaattctgcttgcagaaaagtacaacacatggttgtgaagtctgcattgcttgctgataagtttccagttcttcatgacattggaaatccaaaggctatcaagtgtgtgcctcaggctgaagtagaatggaagttctacgatgctcagccatgtagtgacaaagcttacaaaatagaggaactcttctattcttatgctacacatcacgataaattcactgatggtgtttgtttgttttggaattgtaacgttgatcgttacccagccaatgcaattgtgtgtaggtttgacacaagagtcttgtcaaacttgaacttaccaggctgtgatggtggtagtttgtatgtgaataagcatgcattccacactccagctttcgataaaagtgcatttactaatttaaagcaattgcctttcttttactattctgatagtccttgtgagtctcatggcaaacaagtagtgtcggatattgattatgttccactcaaatctgctacgtgtattacacgatgcaatttaggtggtgctgtttgcagacaccatgcaaatgagtaccgacagtacttggatgcatataatatgatgatttctgctggatttagcctatggatttacaaacaatttgatacttataacctgtggaatacatttaccaggttacagagtttagaaaatgtggcttataatgttgttaataaaggacactttgatggacacgccggcgaagcacctgtttccatcattaataatgctgtttacacaaaggtagatggtattgatgtggagatctttgaaaataagacaacacttcctgttaatgttgcatttgagctttgggctaagcgtaacattaaaccagtgccagagattaagatactcaataatttgggtgttgatatcgctgctaatactgtaatctgggactacaaaagagaagccccagcacatgtgtctacaataggtgtctgcacaatgactgacattgccaagaaacctactgagagtgcttgttcttcacttactgtcttgtttgatggtagagtggaaggacaggtagacctttttagaaacgcccgtaatggtgttttaataacagaaggttcagtcaaaggtctaacaccttcaaagggaccagcacaagctagcgtcaatggagtcacattaattggagaatcagtaaaaacacagtttaactactttaagaaagtagacggcattattcaacagttgcctgaaacctactttactcagagcagagacttagaggattttaagcccagatcacaaatggaaactgactttctcgagctcgctatggatgaattcatacagcgatataagctcgagggctatgccttcgaacacatcgtttatggagatttcagtcatggacaacttggcggtcttcatttaatgataggcttagccaagcgctcacaagattcaccacttaaattagaggattttatccctatggacagcacagtgaaaaattacttcataacagatgcgcaaacaggttcatcaaaatgtgtgtgttctgtgattgatcttttacttgatgactttgtcgagataataaagtcacaagatttgtcagtgatttcaaaagtggtcaaggttacaattgactatgctgaaatttcattcatgctttggtgtaaggatggacatgttgaaaccttctacccaaaactacaagcaagtcaagcgtggcaaccaggtgttgcgatgcctaacttgtacaagatgcaaagaatgcttcttgaaaagtgtgaccttcagaattatggtgaaaatgctgttatacccaaaggaataatgatgaatgtcgcaaagtatactcaactgtgtcaatacttaaatacacttactttagctgtaccctacaacatgagagttattcactttggtgctggctctgataaaggagttgcaccaggtacagctgtgctcagacaatggttgccaactggcacactacttgtcgattcagatcttaatgacttcgtctccgacgcagattctactttaattggagactgtgcaacagtacatacggctaataaatgggaccttattattagcgatatgtatgaccctaggaccaaacatgtgacaaaagagaatgactctaaagaagggtttttcacttatctgtgtggatttataaagcaaaaactagccctgggtggttctatagctgtaaagataacagagcattcttggaatgctgacctttacaagcttatgggccatttctcatggtggacagcttttgttacaaatgtaaatgcatcatcatcggaagcatttttaattggggctaactatcttggcaagccgaaggaacaaattgatggctataccatgcatgctaactacattttctggaggaacacaaatcctatccagttgtcttcctattcactctttgacatgagcaaatttcctcttaaattaagaggaactgctgtaatgtctcttaaggagaatcaaatcaatgatatgatttattctcttctggaaaaaggtaggcttatcattagagaaaacaacagagttgtggtttcaagtgatattcttgttaacaactaaacgaacatgtttattttcttattatttcttactctcactagtggtagtgaccttgaccggtgcaccacttttgatgatgttcaagctcctaattacactcaacatacttcatctatgaggggggtttactatcctgatgaaatttttagatcagacactctttatttaactcaggatttatttcttccattttattctaatgttacagggtttcatactattaatcatacgtttgacaaccctgtcataccttttaaggatggtatttattttgctgccacagagaaatcaaatgttgtcccgtggttgggtttttggttctaccatgaacaacaagtcacagtcggtgattattattaacaattctactaatgttgttatacgagcatgtaactttgaattgtgtgacaaccctttctttgctgtttctaaacccatgggtacacagacacatactatgatattcgataatgcatttaattgcactttcgagtacatatctgatgccttttcgcttgatgtttcagaaaagtcaggtaattttaaacacttacgagagtttgtgtttaaaaataaagatgggtttctctatgtttataagggctatcaacctatagatgtagttcgtgatctaccttctggttttaacactttgaaacctatttttaagttgcctcttggtattaacattacaaattttagagccattcttacagccttttcacctgctcaagacacttggggcacgtcagctgcagcctattttgttgggctatttaaagccaactacatttatgctcaagtatgatgaaaatggtacaatcacagatgctgttgattgttctcaaaatccacttgctgaactcaaatgctctgttaagagctttgagattgacaaaggaatttaccagacctctaatttcagggttgttccctcaggagatgttgtgagattccctaatattacaaacttgtgtcctttgggagaggtttttaatgctactaaattcccttctgtctatgcatgggagagaaaaaaaatttctaattgtgttgctgattactctgtgctctacaactcaacatttttttcaacctttaagtgctatggcgtttctgccactaagttgaatgatctttgcttctccaatgtctatgcagattcttttgtagtcaagggagatgatgtaagacaaatagcgccaggacaaactggtgttattgctgattataattataaattgccagatgatttcatgggttgtgtccttgcttggaatactaggaacattgatgctacttcaactggtaattataattataaatataggtatcttagacatggcaagcttaggccctttgagagagannnnnnnnnnnnnnnnnnnnnnnnnnnnnnnnnnnnnnnnnnnnnnnnnnnnnnnnnnnnnnnnnnnnnnnnnnnnnnnnnnnnnnnnnnnnnnnnnnnntcttaattgttattggccattaaatgattatggtttttacaccactactggcattggctaccaaccttacagagttgtagtactttcttttgaacttttaaatgcaccggccacggtttgtggaccaaaattatccactgaccttattaagaaccagtgtgtcaattttaattttaatggactcactggtactggtgtgttaactccttcttcaaagagatttcaaccatttcaacaatttggccgtgatgtttctgatttcactgattccgttcgagatcctaaaacatctgaaatattagacatttcaccttgctcttttgggggtgtaagtgtaattacacctggaacaaatgcttcatctgaagttgctgttctatatcaagatgttaactgcactgatgtttctacagcaattcatgcagatcaactcacaccagcttggcgcatatattctactggaaacaatgtattccagactcaagcaggctgtcttataggagctgagcatgtcgacacttcttatgagtgcgacattcctattggagctggcatttgtgctagttaccatacagtttctttattacgtagtactagccaaaaatctattgtggcttatactatgtctttaggtgctgatagttcaattgcttactctaataacaccattgctatacctactaacttttcaattagcattactacagaagtaatgcctgtttctatggctaaaacctccgtagattgtaatatgtacatctgcggagattctactgaatgtgctaatttgcttctccaatatggtagcttttgcacacaactaaatcgtgcactctcaggtattgctgctgaacaggatcgcaacacacgtgaagtgttcgctcaagtcaaacaaatgtacaaaaccccaactttgaaatattttggtggttttaatttttcacaaatattacctgaccctctaaagccaactaagaggtcttttattgaggacttgctctttaataaggtgacactcgctgatgctggcttcatgaagcaatatggcgaatgcctaggtgatattaatgctagagatctcatttgtgcgcagaagttcaatggacttacagtgttgccacctctgctcactgatgatatgattgctgcctacactgctgctctagttagtggtactgccactgctggatggacatttggtgctggcgctgctcttcaaataccttttgctatgcaaatggcatataggttcaatggcattggagttacccaaaatgttctctatgagaaccaaaaacaaatcgccaaccaatttaacaaggcgattagtcaaattcaagaatcacttacaacaacatcaactgcattgggcaagctgcaagacgttgttaaccagaatgctcaagcattaaacacacttgttaaacaacttagctctaattttggtgcaatttcaagtgtgctaaatgatatcctttcgcgacttgataaagtcgaggcggaggtacaaattgacaggttaattacaggcagacttcaaagccttcaaacctatgtaacacaacaactaatcagggctgctgaaatcagggcttctgctaatcttgctgctactaaaatgtctgagtgtgttcttggacaatcaaaaagagttgacttttgtggaaagggctaccaccttatgtccttcccacaagcagccccgcatggtgttgtcttcctacatgtcacgtatgtgccatcccaggagaggaacttcaccacagcgccagcaatttgtcatgaaggcaaagcatacttccctcgtgaaggtgtttttgtgtttaatggcacttcttggtttattacacagaggaacttcttttctccacaaataattactacagacaatacatttgtctcaggaaattgtgatgtcgttattggcatcattaacaacacagtttatgatcctctgcaacctgagcttgactcattcaaagaagagctggacaagtacttcaaaaatcatacatcaccagatgttgatcttggcgacatttcaggcattaacgcttctgtcgtcaacattcaaaaagaaattgaccgcctcaatgaggtcgctaaaaatttaaatgaatcactcattgaccttcaagaattgggaaaatatgagcaatatattaaatggccttggtatgtttggctcggcttcattgctggactaattgccatcgtcatggttacaatcttgctttgttgcatgactagttgttgcagttgcctcaagggtgcatgctcttgtggttcttgctgcaagtttgatgaggatgactctgagccagttctcaagggtgtcaaattacattacacataaacgaacttatggatttgtttatgagattttttactcttgaatcaattactgcacagccagtaaaaattgacaatgcttctcctgcaagtactgttcatgctacagcaacgataccgctacaagcctcactccctttcggagtggcttgttattggcgttgcatttcttgctgtttttcacgagcgctaccaaaataattgcgctcaataaaagatggcagctagccctttataagggcttccagttcatttgcaatttactgctgctatttgttaccatctattcacatcttttgcttgtcgctgcaggtatggaggcgcaatttttgtacctctatgccttgatatattttctacaatgcatcaacgcatgtagaattattatgagatgttggctttgttggaagtgcaaatccaagaacccattactttatgatgccaactactttgtttgctggcacacacataactatgactactgtataccatataacagtgtcacagatacaattgtcgttactgaaggtgacggcatttcaacaccaaaactcaaagaagactaccaaattggtggttattctgaggataggcactcaggtgttaaagactatgtcgttgtacatggctatttcaccgaagtttactaccagcttgagtctacacaaattactacagacactggtattgaaaatgctacattcttcatctttaacaagcttgttaaagatccaccgaatgtgcaaatacacacaatcgacggctcttcaggagttgctaatccagcaatggatccaatttatgatgagccgacgacgactactagcgtgcctttgtaagcacaagaaagtgagtacgaacttatgtactcattcgtttcggaagaaacaggtacgttaatagttaatagcgtacttctttttcttgctttcgtggtattcttgctagtcacactagccatccttactgcgcttcgattgtgtgcgtactgctgcaatattgttaacgtgagtttagtaaaaccaacggtttacgtctactcgcgtgttaaaaatctgaactcttctgaaggagttcctgatcttctggtctaaacgaactaactattattattattctgtttggaactttaacattgcttatcatggcagacaacggtactattaccgttgaggagcttaaacaactcctggaacaatggaacctagtaataggtttcctattcctagcctggattatgttactacaatttgcctattctaatcggaacaggtttttgtacataataaagcttgttttcctctggctcttgtggccagtaacacttgcttgttttgtgcttgctgctgtctacagaattaattgggtgactggcgggattgcgattgcaatggcttgtattgtaggcttgatgtggcttagctacttcgttgcttccttcaggctgtttgctcgtacccgctcaatgtggtcattcaacccagaaacaaacattcttctcaatgtgcctctccgggggacaattgtgaccagaccgctcatggaaagtgaacttgtcattggtgctgtgatcattcgtggtcacttgcgaatggccggacactccctagggcgctgtgacattaaggacctgccaaaagagatcactgtggctacatcacgaacgctttcttattacaaattaggagcgtcgcagcgtgtaggcactgattcaggttttgctgcatacaaccgctaccgtattggaaactataaattaaatacagaccacgccggtagcaacgacaatattgctttgctagtacagtaagtgacaacagatgtttcatcttgttgacttccaggttacaatagcagagatattgattatcattatgaggactttcaggattgctatttggaatcttgacgttataataagttcaatagtgagacaattatttaagcctctaactaagaagaattattcggagttagatgatgaagaacttatggagttagattatccataaaacgaacatgaaaattattctcttcctgacattgattgtatttacatcttgcgagctatatcactatcaggagtgtgttagaggtacgactgtactactaaaagaaccttgcccatcaggaacatacgagggcaattcaccatttcaccctcttgctgacaataaatttgcactaacttgcactagcacacactttgcttttgcttgtgctgacggtactcgacatacctatcagctgcgtgcaagatcagtttcaccaaaacttttcatcagacaagaggaggttcaacaagagctctactcgccactttttctcattgttgctgctctagtatttttaatactttgcttcaccattaagagaaagacagaatgaatgagctcactttaattgacttctatttgtgctttttagcctttctgctattccttgttttaataatgcttattatattttggttttcactcgaaatccaggatctagaagaaccttgtaccaaagtctaaacgaacatgaaacttctcattgttttgacttgtatttctctatgcagttgcatacgcactgtagtacagcgctgtgcatctaataaacctcatgtgcttgaagatccttgtaaggtacaacactaggggtaatacttatagcactgcttggctttgtgctctaggaaaggttttaccttttcatagatggcacactatggttcaaacatgcacacctaatgttactatcaactgtcaagatccagctggtggtgcgcttatagctaggtgttggtaccttcatgaaggtcaccaaactgctgcatttagagacgtacttgttgttttaaataaacgaacaaattaaaatgtctgataatggaccccaatcaaaccaacgtagtgccccccgcattacatttggtggacccacagattcaactgacaataaccagaatggaggacgcaatggggcaaggccaaaacagcgccgaccccaaggtttacccaataatactgcgtcttggttcacagctctcactcagcatggcaaggaggaacttagattccctcgaggccagggcgttccaatcaacaccaatagtggtccagatgaccaaattggctactaccgaagagctacccgacgagttcgtggtggtgacggcaaaatgaaagagctcagccccagatggtacttctattacctaggaactggcccagaagcttcacttccctacggcgctaacaaagaaggcatcgtatgggttgcaactgagggagccttgaatacacccaaagaccacattggcacccgcaatcctaataacaatgctgccaccgtgctacaacttcctcaaggaacaacattgccaaaaggcttctacgcagagggaagcagaggcggcagtcaagcctcttctcgctcctcatcacgtagtcgcggtaattcaagaaattcaactcctggcagcagtaggggaaattctcctgctcgaatggctagcggaggtggtgaaactgccctcgcgctattgctgctagacagattgaaccagcttgagagcaaagtttctggtaaaggccaacaacaacaaggccaaactgtcactaagaaatctgctgctgaggcatctaaaaagcctcgccaaaaacgtactgccacaaaacagtacaacgtcactcaagcatttgggagacgtggtccagaacaaacccaaggaaatttcggggaccaagacctaatcagacaaggaactgattacaaacattggccgcaaattgcacaatttgctccaagtgcctctgcattctttggaatgtcacgcattggcatggaagtcacaccttcgggaacatggctgacttatcatggagccattaaattggatgacaaagatccacaattcaaagacaacgtcatactgctgaacaagcacattgacgcatacaaaacattcccaccaacagagcctaaaaaggacaaaaagaaaaagactgatgaagctcagcctttgccgcagagaccaaagaagcagcccactgtgactcttcttcctgcggctgacatggatgatttctccagacaacttcaaaattccatgagtggagcttctgctgattcaactcaggcataaacactcatgatgaccacacaaggcagatgggctatgtaaacgttttcgcaattccgtttacgatacatagtctactcttgtgcagaatgaattctcgtaactaaacagcacaagtaggtttagttaactttaatctcacatagcaatctttaatcaatgtgtaacattagggaggacttgaaagagccaccacattttcatcgaggccacgcggagtacgatcgagggtacagtgaataatgctagggagagctgcctatatggaagagccctaatg

SEQ ID NO: 50 - DNA, 29291 bp, Coronavirus
  misc_feature 6112, 10070-10169, 10560, 10775, 10849-10948, 21378-21477, 22501,23795-23894, 25144-25243, 26737, 26823-26922, 28128, 28463,: n = A,T,C or G
tagatctgttctctaaacgaactttaaaatctgtgtagctgtcgctcggctgcatgcctagtgcacctacgcagtataaacaataataaattttactgtcgttgacaagaaacgagtaactcgtccctcttctgcagactgcttacggtttcgtccgtgttgcagtcgatcatcagcatacctaggtttcgtccgggtgtgaccgaaaggtaagatggagagccttgttcttggtgtcaacgagaaaacacacgtccaactcagtttgcctgtccttcaggttagagacgtgctagtgcgtggcttcggggactctgtggaagaggccctatcggaggcacgtgaacacctcaaaaatggcacttgtggtctagtagagctggaaaaaggcgtactgccccagcttgaacagccctatgtgttcattaaacgttctgatgccttaagcaccaatcacggccacaaggtcgttgagctggttgcagaaatggacggcattcagtacggtcgtagcggtataacactgggagtactcgtgccacatgtgggcgaaaccccaattgcataccgcaatgttcttcttcgtaagaacggtaataagggagccggtggtcatagctatggcatcgatctaaagtcttatgacttaggtgacgagcttggcactgatcccattgaagattatgaacaaaactggaacactaagcatggcagtggtgcactccgtgaactcactcgtgagctcaatggaggtgcagtcactcgctatgtcgacaacaatttctgtggcccagatgggtaccctcttgattgcatcaaagattttctcgcacgcgcgggcaagtcaatgtgcactctttccgaacaacttgattacatcgagtcgaagagaggtgtctactgctgccgtgaccatgagcatgaaattgcctggttcactgagcgctctgataagagctacgagcaccagacacccttcgaaattaagagtgccaagaaatttgacactttcaaaggggaatgcccaaagtttgtgtttcctcttaactcaaaagtcaaagtcattcaaccacgtgttgaaaagaaaaagactgagggtttcatggggcgtatacgctctgtgtaccctgttgcatctccacaggagtgtaacaatatgcacttgtctaccttgatgaaatgtaatcattgcgatgaagtttcatggcagacgtgcgactttctgaaagccacttgtgaacattgtggcactgaaaatttagttattgaaggacctactacatgtgggtacctacctactaatgctgtagtgaaaatgccatgtcctgcctgtcaagacccagagattggacctgagcatagtgttgcagattatcacaaccactcaaacattgaaactcgactccgcaagggaggtaggactagatgttttggaggctgtgtgtttgcctatgttggctgctataataagcgtgcctactgggttcctcgtgctagtgctgatattggctcaggccatactggcattactggtgacaatgtggagaccttgaatgaggatctccttgagatactgagtcgtgaacgtgttaacattaacattgttggcgattttcatttgaatgaagaggttgccatcattttggcatctttctctgcttctacaagtgcctttattgacactataaagagtcttgattacaagtctttcaaaaccattgttgagtcctgcggtaactataaagttaccaagggaaagcccgtaaaaggtgcttggaacattggacaacagagatcagttttaacaccactgtgtggttttccctcacaggctgctggtgttatcagatcaatttttgcgcgcacacttgatgcagcaaaccactcaattcctgatttgcaaagagcagctgtcaccatacttgatggtatttctgaacagtcattacgtcttgtcgacgccatggtttatacttcagacctgctcaccaacagtgtcattattatggcatatgtaactggtggtcttgtacaacagacttctcagtggttgtctaatcttttgggcactactgttgaaaaactcaggcctatctttgaatggattgaggcgaaacttagtgcaggagttgaatttctcaaggatgcttgggagattctcaaatttctcattacaggtgtttttgacatcgtcaagggtcaaatacaggttgcttcagataacatcaaggattgtgtaaaatgcttcattgatgttgttaacaaggcactcgaaatgtgcattgatcaagtcactatcgctggcgcaaagttgcgatcactcaacttaggtgaagtcttcatcgctcaaagcaagggactttaccgtcagtgtatacgtggcaaggagcagctgcaactactcatgcctcttaaggcaccaaaagaagtaacctttcttgaaggtgattcacatgacacagtacttacctctgaggaggttgttctcaagaacggtgaactcgaagcactcgagacgcccgttgatagcttcacaaatggagctatcgttggcacaccagtctgtgtaaatggcctcatgctcttagagattaaggacaaagaacaatactgcgcattgtctcctggtttactggctacaaacaatgtctttcgcttaaaagggggtgcaccaattaaaggtgtaacctttggagaagatactgtttgggaagttcaaggttacaagaatgtgagaatcacatttgagcttgatgaacgtgttgacaaagtgcttaatgaaaagtgctctgtctacactgttgaatccggtaccgaagttactgagtttgcatgtgttgtagcagaggctgttgtgaagactttacaaccagtttctgatctccttaccaacatgggtattgatcttgatgagtggagtgtagctacattctacttatttgatgatgctggtgaagaaaacttttcatcacgtatgtattgttccttttaccctccagatgaggaagaagaggacgatgcagagtgtgaggaagaagaaattgatgaaacctgtgaacatgagtacggtacagaggatgattatcaaggtctccctctggaatttggtgcctcagctgaaacagttcgagttgaggaagaagaagaggaagactggctggatgatactactgagcaatcagagattgagccagaaccagaacctacacctgaagaaccagttaatcagtttactggttatttaaaacttactgacaatgttgccattaaatgtgttgacatcgttaaggaggcacaaagtgctaatcctatggtgattgtaaatgctgctaacatacacctgaaacatggtggtggtgtagcaggtgcactcaacaaggcaaccaatggtgccatgcaaaaggagagtgatgattacattaagctaaatggccctcttacagtaggagggtcttgtttgctttctggacataatcttgctaagaagtgtctgcatgttgttggacctaacctaaatgcaggtgaggacatccagcttcttaaggcagcatatgaaaatttcaattcacaggacatcttacttgcaccattgttgtcagcaggcatatttggtgctaaaccacttcagtctttacaagtgtgcgtgcagacggttcgtacacaggtttatattgcagtcaatgacaaagctctttatgagcaggttgtcatggattatcttgataacctgaagcctagagtggaagcacctaaacaagaggagccaccaaacacagaagattccaaaactgaggagaaatctgtcgtacagaagcctgtcgatgtgaagccaaaaattaaggcctgcattgatgaggttaccacaacactggaagaaactaagtttcttaccaataagttactcttgtttgctgatatcaatggtaagctttaccatgattctcagaacatgcttagaggtgaagatatgtctttccttgagaaggatgcaccttacatggtaggtgatgttatcactagtggtgatatcacttgtgttgtaataccctccaaaaaggctggtggcactactgagatgctctcaagagctttgaagaaagtgccagttgatgagtatataaccacgtaccctggacaaggatgtgctggttatacacttgaggaagctaagactgctcttaagaaatgcaaatctgcattttatgtactaccttcagaagcacctaatgctaaggaagagattctaggaactgtatcctggaatttgagagaaatgcttgctcatgctgaagagacaagaaaattaatgcctatatgcatggatgttagagccataatggcaaccatccaacgtaagtataaaggaattaaaattcaagagggcatcgttgactatggtgtccgattcttcttttatactagtaaagagcctgtagcttctattattacgaagctgaactctctaaatgagccgcttgtcacaatgccaattggttatgtgacacatggttttaatcttgaagaggctgcgcgctgtatgcgttctcttaaagctcctgccgtagtgtcagtatcatcaccagatgctgttactacatataatggatacctcacttcgtcatcaaagacatctgaggagcactttgtagaaacagtttctttggctggctcttacagagattggtcctattcaggacagcgtacagagttaggtgttgaatttcttaagcgtggtgacaaaattgtgtaccacactctggagagccccgtcgagtttcatcttgacggtgaggttctttcacttgacaaactaaagagtctcttatccctgcgggaggttaagactataaaagtgttcacaactgtggacaacactaatctccacacacagcttgtggatatgtctatgacatatggacagcagtttggtccaacatacttggatggtgctgatgttacaaaaattaaacctcatgtaaatcatgagggtaagactttctttgtactacctagtgatgacacactacgtagtgaagctttcgagtactaccatactcttgatgagagttttcttggtaggtacatgtctgctttaaaccacacaaagaaatggaaatttcctcaagttggtggtttaacttcaattaaatgggctgataacaattgttatttgtctagtgttttattagcacttcaacagcttgaagtcaaattcaatgcaccagcacttcaagaggcttattatagagcccgtgctggtgatgctgctaacttttgtgcactcatactcgcttacagtaataaaactgttggcgagcttggtgatgtcagagaaactatgacccatcttctacagcatgctaatttggaatctgcaaagcgagttcttaatgtggtgtgtaaacattgtggtcagaaaactactaccttaacgggtgtagaagctgtgatgtatatgggtactctatcttatgataatcttaagacaggtgtttccattccatgtgtgtgtggtcgtgatgctacacaatatctagtacaacaagagtcttcttttgttatgatgtctgcaccacctgctgagtataaattacagcaaggtacattcttatgtgcgaatgagtacactggtaactatcagtgtggtcattacactcatataactgctaaggagaccctctatcgtattgacggagctcaccttacaaagatgtcagagtacaaaggaccagtgactgatgttttctacaaggaaacatcttacactacaaccatcaagcctgtgtcgtataaactcgatggagttacttacacagagattgaaccaaaattggatgggtattataaaaaggataatgcttactatacagagcagcctatagaccttgtaccaactcaaccattaccaaatgcgagttttgataatttcaaactcacatgttctaacacaaaatttgctgatgatttaaatcaaatgacaggcttcacaaagccagcttcacgagagctatctgtcacattcttcccagacttgaatggcgatgtagtggctattgactatagacactattcagcgagtttcaagaaaggtgctaaattactgcataagccnattgtttggcacattaaccaggctacaaccaagacaacgttcaaaccaaacacttggtgtttacgttgtctttggagtacaaagccagtagatacttcaaattcatttgaagttctggcagtagaagacacacaaggaatggacaatcttgcttgtgaaagtcaacaacccacctctgaagaagtagtggaaaatcctaccatacagaaggaagtcatagagtgtgacgtgaaaactaccgaagttgtaggcaatgtcatacttaaaccatcagatgaaggtgttaaagtaacacaagagttaggtcatgaggatcttatggctgcttatgtggaaaacacaagcattaccattaagaaacctaatgagctttcactagccttaggtttaaaaacaattgccactcatggtattgctgcaattaatagtgttccttggagtaaaattttggcttatgtcaaaccattcttaggacaagcagcaattacaacatcaaattgcgctaagagattagcacaacgtgtgtttaacaattatatgccttatgtgtttacattattgttccaattgtgtacttttactaaaagtaccaattctagaattagagcttcactacctacaactattgctaaaaatagtgttaagagtgttgctaaattatgtttggatgccggcattaattatgtgaagtcacccaaattttctaaattgttcacaatcgctatgtggctattgttgttaagtatttgcttaggttctctaatctgtgtaactgctgcttttggtgtactcttatctaattttggtgctccttcttattgtaatggcgttagagaattgtatcttaattcgtctaacgttactactatggatttctgtgaaggttcttttccttgcagcatttgtttaagtggattagactcccttgattcttatccagctcttgaaaccattcaggtgacgatttcatcgtacaagctagacttgacaattttaggtctggccgctgagtgggttttggcatatatgttgttcacaaaattcttttatttattaggtctttcagctataatgcaggtgttctttggctattttgctagtcatttcatcagcaattcttggctcatgtggtttatcattagtattgtacaaatggcacccgtttctgcaatggttaggatgtacatcttctttgcttctttgctactacatatggaagagctatgttcatatcatggatggttgcacctcttcgacttgcatgatgtgctataagcgcaatcgtgccacacgcgttgagtgtacaactattgttaatggcatgaagagatctttctatgtctatgcaaatggaggccgtggcttctgcaagactcacaattggaattgtctcaattgtgacacattttgcactggtagtacattcattagtgatgaagttgctcgtgatttgtcactccagtttaaaagaccaatcaaccctactgaccagtcatcgtatattgttgatagtgttgctgtgaaaaatggcgcgcttcacctctactttgacaaggctggtcaaaagacctatgagagacatccgctctcccattttgtcaatttagacaatttgagagctaacaacactaaaggttcactgcctattaatgtcatagtttttgatggcaagtccaaatgcgacgagtctgcttctaagtctgcttctgtgtactacagtcagctgatgtgccaacctattctgttgcttgaccaagttcttgtatcagacgttggagatagtactgaagtttccgttaagatgtttgatgcttatgtcgacaccttttcagcaacttttagtgttcctatggaaaaacttaaggcacttgttgctacagctcacagcgagttagcaaagggtgtagctttagatggtgtcctttctacattcgtgtcagctgcccgacaaggtgttgttgaaaccgatgttgacacaaaggatgttattgaatgtctcaaactttcacatcactctgacttagaagtgacaggtgacagttgtaacaatttcatgctcacctataataaggttgaaaacatgacgcccagagatcttggcgcatgtattgactgtaatgcaaggcatatcaatgcccaagtagcaaaaagtcacaatgtttcactcatctggaatgtaaaagactacatgtctttatctgaacagctgcgtaaacaaattcgtagtgctgccaagaagaacaacataccttttagactaacttgtgctacaactagacaggttgtcaatgtcataactactaaaatctcactcaagggtggtaagattgttagtacttgttttaaacttatgcttaaggccacattattgtgcgttcttgctgcattggtttgttatatcgttatgccagtacatacattgtcaatccatgatggttacacaaatgaaatcattggttacaaagccattcaggatggtgtcactcgtgacatcatttctactgatgattgttttgcaaataaacatgctggttttgacgcatggtttagccagcgtggtggttcatacaaaaatgacaaaagctgccctgtagtagctgctatcattacaagagagattggtttcatagtgcctggcttaccgggtactgtgctgagagcaatcaatggtgacttcttgcattttctacctcgtgtttttagtgctgttggcaacatttgctacacaccttccaaactcattgagtatagtgattttgctacctctgcttgcgttcttgctgctgagtgtacaatttttaaggatgctatgggcaaacctgtgccatattgttatgacactaatttgctagagggttctatttcttatagtgagcttcgtccagacactcgttatgtgcttatggatggttccatcatacagtttcctaacacttacctggagggttctgttagagtagtaacaacttttgatgctgagtactgtagacatggtacatgcgaaaggtcagaagtaggtatttgcctatctaccagtggtagatgggttcttaataatgagcattacagagctctatcaggagttttctgtggtgttgatgcgatgaatctcatagctaacatctttactcctcttgtgcaacctgtgggtgctttagatgtgtctgcttcagtagtggctggtggtattattgccatattggtgacttgtgctgcctactactttatgaaattcagacgtgcttttggtgagtacaaccatgttgttgctgctaatgcacttttgtttttgatgtctttcactatactctgtctggtaccagcttacagctttctgccgggagtctactcagtcttttacttgtacttgacattctatttcaccaatgatgtttcattcttggctcaccttcaatggtttgccatgttttctcctattgtgcctttttggataacagcaatctatgtattctgtatttctctgaagcactgccattggttctttaacaactatcttaggaaaagagtcatgtttaatggagttacatttagtaccttcgaggaggctgctttgtgtacctttttgctcaacaaggaaatgtacctaaaattgcgtagcgagacactgttgccacttacacagtataacaggtatcttgctctatataacaagtacaagtatttcagtggagtcttagatactaccagctatcgtgaagcagcttgctgccacttagcaaaggctctaaatgactttagcaactcaggtgctgatgttctctaccaaccaccacagacatcaatcacttctgctgttctgcagagtggttttaggaaaatggcattcccgtcaggcaaagttgaagggtgcatggtacaagtaacctgtggaactacaactcttaatggattgtggttggatgacacagtatactgtccaagacatgtcatttgcacnnnnnnnnnnnnnnnnnnnnnnnnnnnnnnnnnnnnnnnnnnnnnnnnnnnnnnnnnnnnnnnnnnnnnnnnnnnnnnnnnnnnnnnnnnnnnnnnnnnngatctgctcattcgcaaatccaaccatagctttcttgttcaggctggcaatgttcaacttcgtgttattggccattctatgcaaaattgtctgcttaggcttaaagttgatacttctaaccctaagacacccaagtataaatttgtccgtatccaacctggtcaaacattttcagttctagcatgctacaatggttcaccatctggtgtttatcagtgtgccatgagacctaatcataccattaaaggttctttccttaatggatcatgtggtagtgttggttttaacattgattatgattgcgtgtctttctgctatatgcatcatatggagcttccaacaggagtacacgctggtactgacttagaaggtaaattctatggtccatttnttgacagacaaactgcacaggctgcaggtacagacacaaccataacattaaatgttttggcatggctgtatgctgctgttatcaatggtgataggtggtttcttaatagattcaccactactttgaatgactttaaccttgtggcaatgaagtacaactatgaacctttgacacaagatcatgttgacatattgggacctctttctgctcaaacnggaattgccgtcttagatatgtgtgctgctttgaaagagctgctgcagaatggtatgaatggtcgtactatccnnnnnnnnnnnnnnnnnnnnnnnnnnnnnnnnnnnnnnnnnnnnnnnnnnnnnnnnnnnnnnnnnnnnnnnnnnnnnnnnnnnnnnnnnnnnnnnnnnnncaaggtaagttcaagaaaattgttaagggcactcatcattggatgcttttaactttcttgacatcactattgattcttgttcaaagtacacagtggtcactgtttttcttgtttacgagaatgctttcttgccatttactcttggtattatggcaattgctgcatgtgctatgctgcttgttaagcataagcacgcattcttgtgcttgtttctgttaccttctcttgcaacagttgcttactttaatatggtctacatgcctgctagctgggtgatgcgtatcatgacatggcttgaattggctgacactagcttgtctggttataggcttaaggattgtgttatgtatgcttcagctttagttttgcttattctcatgacagctcgcactgtttatgatgatgctgctagacgtgtttggacactgatgaatgtcattacacttgtttacaaagtctactatggtaatgctttagatcaagctatttccatgtgggccttagttatttctgtaacctctaactattctggtgtcgttacgactatcatgtttttagctagagctatagtgtttgtgtgtgttgagtattacccattgttatttattactggcaacaccttacagtgtatcatgcttgtttattgtttcttaggctattgttgctgctgctactttggccttttctgtttactcaaccgttacttcaggcttactcttggtgtttatgactacttggtctctacacaagaatttaggtatataaactcccagggggcttttgcctcctaagagtagtattgatgctttcaagcttaacattaagttgttgggtattggaggtaaaccatgtatcaaggttgctactgtacagtctaaaatgtctgacgtaaagtgcacatctgtggtactagctctcgcgattcttcaaggcaacttagagtagagtcatcttctaaattgtgggcacaatgtgtacaactccacaatgatattcttcttgcaaaagacacaactgaagctttcgagaagatggtttctcttttgtctgttttgctatccatgcagggtgctgtagacattaataggttgtgcgaggaaatgctcgataaccgtgctactcttcaggctattgcttcagaatttagttctttaccatcatatgccgcttatgccactgcccaggaggcctatgagcaggctgtagctaatggtgattctgaagtcgttctcaaaaagttaaagaaatctttgaatgtggctaaatctgagtttgaccgtgatgctgccatgcaacgcaagttggaaaagatggcagatcaggctatgacccaaatgtacaaacaggcaagatctgaggacaagagggcaaaagtaactagtgctatgcaaacaatgctcttcactatgcttaggaagcttgataatgatgcacttaacaacattatcaacaatgcgcgtgatggttgtgttccactcaacatcataccattgactacagcagccaaactcatggttgttgtccctgattatggtacctacaagaacacttgtgatggtaacacctttacatatgcatctgcactctgggaaatccagcaagttgttgatgcggatagcaagattgttcaacttagtgaaattaacatggacaattcaccaaatttggcttggcctcttattgttacagctctaagagccaactcagctgttaaactacagaataatgaactgagtccagtagcactacgacagatgtcctgtgcggctggtaccacacaaacagcttgtactgatgacaatgcacttgcctactataacaattcgaagggaggtaggtttgtgctggcattactatcagaccaccaagatctcaaatgggctagattccctaagagtgatggtacaggtacaatttacacagaactggaaccaccttgtaggtttgttacagacacaccaaaagggcctaaagtgaaatacttgtacttcatcaaaggcttaaacaacctaaatagaggtatggtgctgggcagtttagctgctacagtacgtcttcaggctggaaatgctacagaagtacctgccaattcaactgtgctttccttctgtgcttttgcagtagaccctgctaaagcatataaggattacctagcaagtggaggacaaccaatcaccaactgtgtgaagatgttgtgtacacacactggtacaggacaggcaattactgtaacaccagaagctaacatggaccaagagtcctttggtggtgcttcatgttgtctgtattgtagatgccacattgaccatccaaatcctaaaggattctgtgacttgaaaggtaagtacgtccaaatacctaccacttgtgctaatgacccagtgggttttacacttagaaacacagtctgtaccgtctgcggaatgtggaaaggttatggctgtagttgtgaccaactccgcgaacccttgatgcagtctgcggatgcatcaacgtttttaaacgggtttgcggtgtaagtgcagcccgtcttacaccgtgcggcacaggcactagtactgatgtcgtctacagggcttttgatatttacaacgaaaaagttgctggttttgcaaagttcctaaaaactaattgctgtcgcttccaggagaaggatgaggaaggcaatttattagactcttactttgtagttaagaggcatactatgtctaactaccaacatgaagagactatttataacttggttaaagattgtccagcggttgctgtccatgactttttcaagtttagagtagatgtgacatggtaccacatatatcacgtcagcgtctaactaaatacacaatggctgatttagtctatgctctacgtcattttgatgagggtaattgtgatacattaaaagaaatactcgtcacatacaattgctgtgatgatgattatttcaataagaaggattggtatgacttcgtagagaatcctgacatcttacgcgtatatgctaacttaggtgagcgtgtacgccaatcattattaaagactgtacaattctgcgatgctatgcgtgatgcaggcattgtaggcgtactgacattagataatcaggatcttaatgggaactggtacgatttcggtgatttcgtacaagtagcaccaggctgcggagttcctattgtggattcatattactcattgctgatgcccatcctcactttgactagggcattggctgctgagtcccatatggatgctgatctcgcaaaaccacttattaagtgggatttgctgaaatatgattttacggaagagagactttgtctcttcgaccgttattttaaatattgggaccagacataccatcccaattgtattaactgtttggatgataggtgtatccttcattgtgcaaactttaatgtgttattttctactgtgtttccacctacaagttttggaccactagtaagaaaaatatttgtagatggtgttccttttgttgtttcaactggataccattttcgtgagttaggagtcgtacataatcaggatgtaaacttacatagctcgcgtctcagtttcaaggaacttttagtgtatgctgctgatccagctatgcatgcagcttctggcaatttattgctagataaacgcactacatgcttttcagtagctgcactaacaaacaatgttgcttttcaaactgtcaaacccggtaattttaataaagacttttatgactttgctgtgtctaaaggtttctttaaggaaggaagttctgttgaactaaaacacttcttctttgctcaggatggcaacgctgctatcagtgattatgactattatcgttataatctgccaacaatgtgtgatatcagacaactcctattcgtagttgaagttgttgataaatactttgattgttacgatggtggctgtattaatgccaaccaagtaatcgttaacaatctggataaatcagctggtttcccatttaataaatggggtaaggctagactttattatgactcaatgagttatgaggatcaagatgcacttttcgcgtatactaagcgtaatgtcatccctactataactcaaatgaatcttaagtatgccattagtgcaaagaatagagctcgcaccgtagctggtgtctctatctgtagtactatgacaaatagacagtttcatcagaaattattgaagtcaatagccgccactagaggagctactgtggtaattggaacaagcaagttttacggtggctggcataatatgttaaaaactgtttacagtgatgtagaaactccacaccttatgggttgggattatccaaaatgtgacagagccatgcctaacatgcttaggataatggcctctcttgttcttgctcgcaaacataacacttgctgtaacttatcacaccgtttctacaggttagctaacgagtgtgcgcaagtattaagtgagatggtcatgtgtggcggctcactatatgttaaaccaggtggaacatcatccggtgatgctacaactgcttatgctaatagtgtctttaacatttgtcaagctgttacagccaatgtaaatgcacttctttcaactgatggtaataagatagctgacaagtatgtccgcaatctacaacacaggctctatgagtgtctctatagaaatagggatgttgatcatgaattcgtggatgagttttacgcttacctgcgtaaacatttctccatgatgattctttctgatgatgccgttgtgtgctataacagtaactatgcggctcaaggtttagtagctagcattaagaactttaaggcagttctttattatcaaaataatgtgttcatgtctgaggcaaaatgttggactgagactgaccttactaaaggacctcacgaatttggctcacagcatacaatgctagttaaacaaggagatgattacgtgtacctgccttacccagatccatcaagaatattaggcgcaggctgttttgtcgatgatattgtcaaaacagatggtacacttatgattgaaaggttcgtgtcactggctattgatgcttacccacttacaaaacatcctaatcaggagtatgctgatgtctttcacttgtatttacaatacattagaaagttacatgatgagcttactggccacatgttggacatgtattccgtaatgctaactaatgataacacctcacggtactgggaacctgagttttatgaggctatgtacacaccacatacagtcttgcaggctgtaggtgcttgtgtattgtgcaattcacagacttcacttcgttgcggtgcctgtattaggagaccattcctatgttgcaagtgctgctatgaccatgtcatttcaacatcacacaaattagtgttgtctgttaatccctatgtttgcaatgccccaggttgtgatgtcactgatgtgacacaactgtatctaggaggtatgagctattattgcaagtcacataagcctcccattagttttccattatgtgctaatggtcaggtttttggtttatacaaaaacacatgtgtaggcagtgacaatgtcactgacttcaatgcgatagcaacatgtgattggactaatgctggcgattacatacttgccaacacttgtactgagagactcaagcttttcgcagcagaaacgctcaaagccactgaggaaacatttaagctgtcatatggtattgccactgtacgcgaagtactctctgacagagaattgcatctttcatgggaggttggaaaacctagaccaccattgaacagaaactatgtctttactggttaccgtgtaactaaaaatagtaaagtacagattggagagtacacctttgaaaaaggtgactatggtgatgctgttgtgtacagaggtactacgacatacaagttgaatgttggtgattactttgtgttgacatctcacactgtaatgccacttagtgcacctactctagtgccacaagagcactatgtgagaattactggcttgtacccaacactcaacatctcagatgagttttctagcaatgttgcaaattatcaaaaggtcggcatgcaaaagtactctacactccaaggaccacctggtactggtaagagtcattttgccatcggacttgctctctattacccatctgctcgcatagtgtatacggcatgctctcatgcagctgttgatgccctatgtgaaaaggcattaaaatatttgcccatagataaatgtagtagaatcatacctgcgcgtgcgcgcgtagagtgttttgataaattcaaagtgaattcaacactagaacagtatgttttctgcactgtaaatgcattgccagaaacaactgctgacattgtagtctttgatgaaatctctatggctactaattatgacttgagtgttgtcaatgctagacttcgtgcaaaacactacgtctatattggcgatcctgctcaattaccagccccccgcacattgctgactaaaggcacactagaaccagaatattttaattcagtgtgcagacttatgaaaacaataggtccagacatgttccttggaacttgtcgccgttgtcctgctgaaattgttgacactgtgagtgctttagtttatgacaataagctaaaagcacacaaggagaagtcagctcaatgcttcaaaatgttctacaaaggtgttattacacatgatgtttcatctgcaatcaacagacctcaaataggcgttgtaagagaatttcttacacgcaatcctgcttggagaaaagctgtttttatctcaccttataattcacagaacgctgtagcttcaaaaatcttaggattgcctacgcagactgttgattcatcacagggttctgaatatgactatgtcatattcacacaaactactgaaacagcacactcttgtaatgtcaaccgcttcaatgtggctatcacaagggcaaaaattggcattttgtgcataatgtctgatagagatctttatgacaaactgcaatttacaagtctagaaataccacgtcgcaatgtggctacattacaagcagaaaatgtaactggactttttaaggactgtagtaagatcattactggtcttcatcctacacaggcacctacacacctcagcgttgatataaagttcaagactgaaggattatgtgttgacataccaggcataccaaaggacatgacctaccgtagactcatctctatgatgggtttcaaaatgaattaccaagtcaatggttaccctaatatgtttatcacccgcgaagaagctattcgtcacgttcgtgcgtggattggctttgatgtagagggctgtcatgcaactagagatgctgtgggtactaacctacctctccagctaggattttctacaggtgttaacttagtagctgtaccgactggttatgttgacactgaaaataacacagaattcaccagagttaatgcaaaacctccaccaggtgaccagtttaaacatcttataccactcatgtataaaggcttgccctggaatgtagtgcgtattaagatagtacaaatgctcagtgatacactgaaaggattgtcagacagagtcgtgttcgtcctttgggcgcatggctttgagcttacatcaatgaagtactttgtcaagattggacctgaaagaacgtgttgtctgtgtgacaaacgtgcaacttgcttttctacttcatcagatacttatgcctgctggaatcattctgtgggttttgactatgtctataacccatttatgattgatgttcagcagtggggctttacgggtaaccttcagagtaaccatgaccaacattgccaggtacatggaaatgcacatgtggctagttgtgatgctatcatgactagatgtttagcagtccatgagtgctttgttaagcgcgttgattggtctgttgaataccctattataggagatgaactgagggttaattctgcttgcagaaaagtacaacacatggttgtgaagtctgcattgcttgctgataagtttccagttcttcatgacattggaaatccaaaggctatcaagtgtgtgcctcaggctgaagtagaatggaagttctacgatgctcagccatgtagtgacaaagcttacaaaatagaggaactcttctattcttatgctacacatcacgataaattcactgatggtgtttgtttgttttggaattgtaacgttgatcgttacccagccaatgcaattgtgtgtaggtttgacacaagagtcttgtcaaacttgaacttaccaggctgtgatggtggtagtttgtatgtgaataagcatgcattccacactccagctttcgataaaagtgcatttactaatttaaagcaattgcctttcttttactattctgatagtccttgtgagtctcatggcaaacaagtagtgtcggatattgattatgttccactcaaatctgctacgtgtattacacgatgcaatttaggtggtgctgtttgcagacaccatgcaaatgagtaccgacagtacttggatgcatataatatgatgatttctgctggatttagcctatggatttacaaacaatttgatacttataacctgtggaatacatttaccaggttacagagtttagaaaatgtggcttataatgttgttaataaaggacactttgatggacacgccggcgaagcacctgtttccatcattaataatgctgtttacacaaaggtagatggtattgatgtggagatctttgaaaataagacaacacttcctgttaatgttgcatttgagctttgggctaagcgtaacattaaaccagtgccagagattaagatactcaataatttgggtgttgatatcgctgctaatactgtaatctgggactacaaaagagaagccccagcacatgtgtctacaataggtgtctgcacaatgactgacattgccaagaaacctactgagagtgcttgttcttcacttactgtcttgtttgatggtagagtggaaggacaggtagacctttttagaaacgcccgtaatggtgttttaataacagaaggttcagtcaaaggtctaacaccttcaaagggaccagcacaagctagcgtcaatggagtcacattaattggagaatcagtaaaaacacagtttaactactttaagaaagtagacggcattattcaacagttgcctgaaacctactttactcagagcagagacttagaggattttaagcccagatcacaaatggaaactgactttctcgagctcgctatggatgaattcatacagcgatataagctcgagggctatgccttcgaacacatcgtttatggagatttcagtcatggacaacttggcggtcttcatttaatgataggcttagccaagcgctcacaagattcaccacttaaattagaggattttatccctattgacagcacagtgaaaaattacttcataacagatgcgcaaacaggttcatcaaaatgtgtgtgttctgtgattgatcttttacttgatgactttgtcgagataataaagtcacaagatttgtcagtgatttcaaaagtggtcaaggttacaattgactatgctgaaatttcattcatgctttggtgtaaggatggacatgttgaaaccttctacccaaaactacaagcaagtcaagcgtggcaaccaggtgttgcgatgcctaacttgtacaagatgcaaagaatgcttcttgaaaagtgtgaccttcagaattatggtgaaaatgctgttataccaaaaggaataatgatgaatgtcgcaaagtatactcaactgtgtcaatacttaaatacacttactttagctgtaccctacaacatgagagttattcactttggtgctggctctgataaaggagttgcaccaggtacagctgtgctcagacaatggttgccaactggcacactaacttgtcgattcagatcttaatgacttcgtctccgacgcagattctactttaattggagactgtgcaacagtacatacggctaataaatgggaccttattattagcgatatgtatgaccctaggaccaaacatgtgacaaaagagaatgactctaaagaagggtttttcacttatctgtgtggatttataaagcaaaaactagccctgggtggttctatagctgtaaagataacagagcattcttggaatgctgacctttacaagcttatgggccatttctcatggtggacagcttttgttacaaatgtaaatgcatcatcatcggaagcatttttaattggggctaactatcttggcaagccgaaggaacaaattgatggctataccatgcatgctaactacattttctggaggaacacaaatcctatccagttgtcttcctattcactctttnnnnnnnnnnnnnnnnnnnnnnnnnnnnnnnnnnnnnnnnnnnnnnnnnnnnnnnnnnnnnnnnnnnnnnnnnnnnnnnnnnnnnnnnnnnnnnnnnnnnggtatttattttgctgccacagagaaatcaaatgtgtccgtggttgggtttttggttctaccatgaacaacaagtcacagtcggtgattattattaacaattctactaatgttgttatacgagcatgtaactttgaattgtgtgacaaccctttctttgctgtttctaaacccatgggtacacagacacatactatgatattcgataatgcatttaattgcactttcgagtacatatctgatgccttttcgcttgatgtttcagaaaagtcaggtaattttaaacacttacgagagtttgtgtttaaaaataaagatgggtttctctatgtttataagggctatcaacctatagatgtagttcgtgatctaccttctggttttaacactttgaaacctatttttaagttgcctcttggtattaacattacaaattttagagccattcttacagccttttcacctgctcaagacacttggggcacgtcagctgcagcctattttgttggctatttaaagccaactacatttatgctcaagtatgatgaaaatggtacaatcacagatgctgttgattgttctcaaaatccacttgctgaactcaaatgctctgttaagagctttgagattgacaaaggaatttaccagacctctaatttcagggttgttccctcaggagatgttgtgagattccctaatattacaaacttgtgtccttttggagaggttttttatgctactaaattcccttctgtctatgcatgggagagaaaaaaaatttctaattgtgttgctgagttactctgtgctctacaactcaacatttttttcaacctttaagtgctatggcgtttctgccactaagttgaatgatctttgcttctccaaagtctatgcagattcttttgtagtcaagggagatgatgtaagacaaatagcgccaggacaaactggtgttattgctgattataattataaattgccagatgatttcatgggttgtgtccttgcttggaatactaggnacattgatgctacttcaactggtaattataattataaatataggtatcttagacatggcaagcttaggccctttgagagagacatatctaatgtgcctttctcccctgatggcaaaccttgcaccccacctgctcttaattgttattggccattaaatgattatggtttttacaccactactggcattggctaccaaccttacagagttgtagtactttcttttgaacttttaaatgcaccggccacggtttgtggaccaaaattatccactgaccttattaagaaccagtgtgtcaattttaattttaatggactcactggtactggtgtgttaactccttcttcaaagagatttcaaccatttcaacaatttggccgtgatgtttctgatttcactgattccgttcgagatcctaaaacatctgaaatattagacatttcaccttgctcttttgggggtgtaagtgtaattacacctggaacaaatgcttcatctgaagttgctgttctatatcaagatgttaactgcactgatgtttctacagcaattcatgcagatcaactcacaccagcttggcgcatatattctactggaaacaatgtattccagactcaagcaggctgtcttataggagctgagcatgtcgacacttcttatgagtgcgacattcctattggagctggcatttgtgctagttaccatacagtttctttattacgtagtactagccaaaaatctattgtggcttatactatgtctttaggtgctgatagttcaattgcttactctaataacaccattgctatacctactaacttttcaattagcattactacagaagtaatgcctgtttctatggctaaaacctccgtagattgtaatatgtacatctgcggagattctactgaatgtgctaatttgcttctccaatatggtagcttttgcacacaactaaatcgtgcactctcaggtattgctgctgaacaggatcgcaacacacgtgaagtgttcgctcaagtcaaacaaatgtacaaaaccccaactttgaaatattttggtggttttaatttttcacaaatattacctgaccctctaaagccaactaagaggtcttttattgaggacttgctctttaataaggtgacactcgctgatgctggcttcatgaagcaatatggcgaatgcctaggtgatattaatgctagagatctcatttgtgcgcagaagttcaatggacttacagtgttgccacctctgctcactgatgatatgattgctgcctacactgctgnnnnnnnnnnnnnnnnnnnnnnnnnnnnnnnnnnnnnnnnnnnnnnnnnnnnnnnnnnnnnnnnnnnnnnnnnnnnnnnnnnnnnnnnnnnnnnnnnnnnggtactgccactgctggatggacatttggtgctggcgctgctcttcaaataccttttgctatgcaaatggcatataggttcaatggcattggagttacccaaaatgttctctatgagaaccaaaaacaaatcgccaaccaatttaacaaggcgattagtcaaattcaagaatcacttacaacaacatcaactgcattgggcaagctgcaagacgttgttaaccagaatgctcaagcattaaacacacttgttaaacaacttagctctaattttggtgcaatttcaagtgtgctaaatgatatcctttcgcgacttgataaagtcgaggcggaggtacaaattgacaggttaattacaggcagacttcaaagccttcaaacctatgtaacacaacaactaatcagggctgctgaaatcagggcttctgctaatcttgctgctactaaaatgtctgagtgtgttcttggacaatcaaaaagagttgacttttgtggaaagggctaccaccttatgtccttcccacaagcagccccgcatggtgttgtcttcctacatgtcacgtatgtgccatcccaggagaggaacttcaccacagcgccagcaatttgtcatgaaggcaaagcatacttccctcgtgaaggtgtttttgtgtttaatggcacttcttggtttattacacagaggaacttcttttctccacaaataattactacagacaatacatttgtctcaggaaattgtgatgtcgttattggcatcattaacaacacagtttatgatcctctgcaacctgagcttgactcattcaaagaagagctggacaagtacttcaaaaatcatacatcaccagatgttgatcttggcgacatttcaggcattaacgcttctgtcgtcaacattcaaaaagaaattgaccgcctcaatgaggtcgctaaaaatttaaatgaatcactcattgaccttcaagaattgggaaaatatgagcaatatattaaatggccttggtatgtttggctcggcttcattgctggactaattgccatcgtcatggttacaatcttgctttgttgcatgactagttgttgcagttgcctcaagggtgcatgctcttgtggttcttgctgcaagtttgatgaggatgactctgagccagttctcaagggtgtcaaattacattacacataaacgaacttatggatttgtttatgagattttttactcttggatcaattactgcacagccagtaaannnnnnnnnnnnnnnnnnnnnnnnnnnnnnnnnnnnnnnnnnnnnnnnnnnnnnnnnnnnnnnnnnnnnnnnnnnnnnnnnnnnnnnnnnnnnnnnnnnnaagaacccattactttatgatgccaactactttgtttgctggcacacacataactatgactactgtataccatataacagtgtcacagatacaattgtcgttactgaaggtgacggcatttcaacaccaaaactcaaagaagactaccaaattggtggttattctgaggataggcactcaggtgttaaagactatgtcgttgtacatggctatttcaccgaagtttactaccagcttgagtctacacaaattactacagacactggtattgaaaatgctacattcttcatctttaacaagcttgttaaagacccaccgaatgtgcaaatacacacaatcgacggctcttcaggagttgctaatccagcaatggatccaatttatgatgagccgacgacgactactagcgtgcctttgtaagcacaagaaagtgagtacgaacttatgtactcattcgtttcggaagaaacaggtacgttaatagttaatagcgtacttctttttcttgctttcgtggtattcttgctagtcacactagccatccttactgcgcttcgattgtgtgcgtactgctgcaatattgttaacgtgagtttagtaaaaccaacggtttacgtctactcgcgtgttaaaaatctgaactcttctgaaggagttcctgatcttctggtctaaacgaactaactattattattattctgtttggaactttaacattgcttatcatggcagacaacggtactattaccgttgaggagcttaaacaactcctggaacaatggaacctagtaataggtttcctattcctagcctggattatgttactacaatttgcctattctaatcggaacaggtttttgtacataataaagcttgttttcctctggctcttgtggccagtaacacttgcttgttttgtgcttgctgctgtctacagaattaattgggtgactggcgggattgcgattgcaatggcttgtattgtaggcttgatgtggcttagctacttcgttgcttccttcaggctgtttgctcgtacccgctcaatgtggtcattcaacccagaaacaaacattcttctcaatgtgcctctccgggggacaattgtgaccagaccgctcatggaaagtgaacttgtcattggtgctgtgatcattcgtggtcacttgcgaatggccggacactccctagggcgctgtgacattaaggacctgccaaaagagatcactgtggctacatcacgaacgctttcttattacaaattaggagcgtcgcagcgtgtaggcactgattcaggttttgctgcatacaaccgctaccgtattggaaactataaattaaatacagaccacgccggtagcaacgacaatattgctttgctagtacagtaagtgacaacagatgtttcatcttgttgacttccaggttacaatagcagagatattgattatcattatgaggactttcaggattgctatttggaatcttgacgtnataataagttcaatagtgagacaattatttaagcctctaactaagaagaattattcggagttagatgatgaagaacttatggagtnnnnnnnnnnnnnnnnnnnnnnnnnnnnnnnnnnnnnnnnnnnnnnnnnnnnnnnnnnnnnnnnnnnnnnnnnnnnnnnnnnnnnnnnnnnnnnnnnnnngacattgattgtatttacatcttgcgagctatatcactatcaggagtgtgttagaggtacgactgtactactaaaagaaccttgcccatcaggaacatacgagggcaattcaccatttcaccctcttgctgacaataaatttgcactaacttgcactagcacacactttgcttttgcttgtgctgacggtactcgacatacctatcagctgcgtgcaagatcagtttcaccaaaacttttcatcagacaagaggaggttcaacaagagctctactcgccactttttctcattgttgctgctctagtatttttaatactttgcttcaccattaagagaaagacagaatgaatgagctcactttaattgacttctatttgtgctttttagcctttctgctattccttgttttaataatgcttattatattttggttttcactcgaaatccaggatctagaagaaccttgtaccaaagtctaaacgaacatgaaacttctcattgttttgacttgtatttctctatgcagttgcatacgcactgtagtacagcgctgtgcatctaataaacctcatgtgcttgaagatccttgtaaggtacaacactaggggtaatacttatagcactgcttggctttgtgctctaggaaaggttttaccttttcatagatggcacactatggttcaaacatgcacacctaatgttactatcaactgtcaagatccagctggtggtgcgcttatagctaggtgttggtaccttcatgaaggtcaccaaactgctgcatttagagacgtacttgttgttttaaataaacgaacaaattaaaatgtctgataatggaccccaatcaaaccaacgtagtgccccccgcattacatttggtggacccacagattcaactgacaataaccagaatggaggacgcaatggggcaaggccaaaacagcgccgaccccaaggtttacccaataatactgcgtcttggttcacagctctcactcagcatggcaaggaggaacttagattccctcgaggccagggcgttccaatcaacaccaatagtggtccagatgaccaaattggctactaccgaagagctacccgacgagttcgtggtggtgacggcaaaatgaaagagctcagccccagatggtacttctattacctaggaactggcccagaagcttcacttccctacggcgctnacaaagaaggcatcgtatgggttgcaactgagggagccttgaatacacccaaagaccacattggcacccgcaatcctaataacaatgctgccaccgtgctacaacttcctcaaggaacaacattgcctaaaaggcttctacgcagagggaagcagaggcggcagtcaagcctcttctcgctcctcatcacgtagtcgcggtaattcaagaaattcaactcctggcagcagtaggggaaattctcctgctcgaatggctagcggaggtggtgaaactgccctcgcgctattgctgctagacagattgaaccagcttgagagcaaagtttctggtanaggccaacaacaacaaggccaaactgtcactaagaaatctgctgctgaggcatctaaaaagcctcgccaaaaacgtactgccacaaaacagtacaacgtcactcaagcatttgggagacgtggtccagaacaaacccaaggaaatttcggggaccaagacctaatcagacaaggaactgattacaaacattggccgcaaattgcacaatttgctccaagtgcctctgcattctttggaatgtcacgcattggcatggaagtcacaccttcgggaacatggctgacttatcatggagccattaaattggatgacaaagatccacaattcaaagacaacgtcatactgctgaacaagcacattgacgcatacaaaacattcccaccaacagagcctaaaaaggacaaaaagaaaaagactgatgaagctcagcctttgccgcagagacaaaagaagcagcccactgtgactcttcttcctgcggctgacatggatgatttctccagacaacttcaaaattccatgagtggagcttctgctgattcaactcaggcataaacactcatgatgaccacacaaggcagatgggctatgtaaacgttttcgcaattccgtttacgatacatagtctactcttgtgcagaatgaattctcgtaactaaacagcacaagtaggtttagttaactttaatctcacatagcaatctttaatcaatgtgtaacattagggaggacttgaaagagccaccacattttcatcgaggccacgcggagtacgatcgagggtacagtgaataatgctagggagagctgcctatatggaagagccc

SEQ ID NO: 51 - DNA, 29740 bp, Coronavirus
taggtttttacctacccaggaaaagccaaccaacctcgatctcttgtagatctgttctctaaacgaactttaaaatctgtgtagctgtcgctcggctgcatgcctagtgcacctacgcagtataaacaataataaattttactgtcgttgacaagaaacgagtaactcgtccctcttctgcagactgcttacggtttcgtccgtgttgcagtcgatcatcagcatacctaggtttcgtccgggtgtgaccgaaaggtaagatggagagccttgttcttggtgtcaacgagaaaacacacgtccaactcagtttgcctgtccttcaggttagagacgtgctagtgcgtggcttcggggactctgtggaagaggccctatcggaggcacgtgaacacctcaaaaatggcacttgtggtctagtagagctggaaaaaggcgtactgccccagcttgaacagccctatgtgttcattaaacgttctgatgccttaagcaccaatcacggccacaaggtcgttgagctggttgcagaaatggacggcattcagtacggtcgtagcggtataacactgggagtactcgtgccacatgtgggcgaaaccccaattgcataccgcaatgttcttcttcgtaagaacggtaataagggagccggtggtcatagctatggcatcgatctaaagtcttatgacttaggtgacgagcttggcactgatcccattgaagattatgaacaaaactggaacactaagcatggcagtggtgcactccgtgaactcactcgtgagctcaatggaggtgcagtcactcgctatgtcgacaacaatttctgtggcccagatgggtaccctcttgattgcatcaaagattttctcgcacgcgcgggcaagtcaatgtgcactctttccgaacaacttgattacatcgagtcgaagagaggtgtctactgctgccgtgaccatgagcatgaaattgcctggttcactgagcgctctgataagagctacgagcaccagacacccttcgaaattaagagtgccaagaaatttgacactttcaaaggggaatgcccaaagtttgtgtttcctcttaactcaaaagtcaaagtcattcaaccacgtgttgaaaagaaaaagactgagggtttcatggggcgtatacgctctgtgtaccctgttgcatctccacaggagtgtaacaatatgcacttgtctaccttgatgaaatgtaatcattgcgatgaagtttcatggcagacgtgcgactttctgaaagccacttgtgaacattgtggcactgaaaatttagttattgaaggacctactacatgtgggtacctacctactaatgctgtagtgaaaatgccatgtcctgcctgtcaagacccagagattggacctgagcatagtgttgcagattatcacaaccactcaaacattgaaactcgactccgcaagggaggtaggactagatgttttggaggctgtgtgtttgcctatgttggctgctataataagcgtgcctactgggttcctcgtgctagtgctgatattggctcaggccatactggcattactggtgacaatgtggagaccttgaatgaggatctccttgagatactgagtcgtgaacgtgttaacattaacattgttggcgattttcatttgaatgaagaggttgccatcattttggcatctttctctgcttctacaagtgcctttattgacactataaagagtcttgattacaagtctttcaaaaccattgttgagtcctgcggtaactataaagttaccaagggaaagcccgtaaaaggtgcttggaacattggacaacagagatcagttttaacaccactgtgtggttttccctcacaggctgctggtgttatcagatcaatttttgcgcgcacacttgatgcagcaaaccactcaattcctgatttgcaaagagcagctgtcaccatacttgatggtatttctgaacagtcattacgtcttgtcgacgccatggtttatacttcagacctgctcaccaacagtgtcattattatggcatatgtaactggtggtcttgtacaacagacttctcagtggttgtctaatcttttgggcactactgttgaaaaactcaggcctatctttgaatggattgaggcgaaacttagtgcaggagttgaatttctcaaggatgcttgggagattctcaaatttctcattacaggtgtttttgacatcgtcaagggtcaaatacaggttgcttcagataacatcaaggattgtgtaaaatgcttcattgatgttgttaacaaggcactcgaaatgtgcattgatcaagtcactatcgctggcgcaaagttgcgatcactcaacttaggtgaagtcttcatcgctcaaagcaagggactttaccgtcagtgtatacgtggcaaggagcagctgcaactactcatgcctcttaaggcaccaaaagaagtaacctttcttgaaggtgattcacatgacacagtacttacctctgaggaggttgttctcaagaacggtgaactcgaagcactcgagacgcccgttgatagcttcacaaatggagctatcgttggcacaccagtctgtgtaaatggcctcatgctcttagagattaaggacaaagaacaatactgcgcattgtctcctggtttactggctacaaacaatgtctttcgcttaaaagggggtgcaccaattaaaggtgtaacctttggagaagatactgtttgggaagttcaaggttacaagaatgtgagaatcacatttgagcttgatgaacgtgttgacaaagtgcttaatgaaaagtgctctgtctacactgttgaatccggtaccgaagttactgagtttgcatgtgttgtagcagaggctgttgtgaagactttacaaccagtttctgatctccttaccaacatgggtattgatcttgatgagtggagtgtagctacattctacttatttgatgatgctggtgaagaaaacttttcatcacgtatgtattgttccttttaccctccagatgaggaagaagaggacgatgcagagtgtgaggaagaagaaattgatgaaacctgtgaacatgagtacggtacagaggatgattatcaaggtctccctctggaatttggtgcctcagctgaaacagttcgagttgaggaagaagaagaggaagactggctggatgatactactgagcaatcagagattgagccagaaccagaacctacacctgaagaaccagttcatcagtttactggttatttaaaacttactgacaatgttgccattaaatgtgttgacatcgttaaggaggcacaaagtgctaatcctatggtgattgtaaatgctgctaacatacacctgaaacatggtggtggtgtagcaggtgcactcaacaaggcaaccaatggtgccatgcaaaaggagagtgatgattacattaagctaaatggccctcttacagtaggagggtcttgtttgctttctggacataatcttgctaagaagtgtctgcatgttgttggacctaacctaaatgcaggtgaggacatccagcttcttaaggcagcatatgaaaatttcaattcacaggacatcttacttgcaccattgttgtcagcaggcatatttggtgctaaaccacttcagtctttacaagtgtgcgtgcagacggttcgtacacaggtttatattgcagtcaatgacaaagctctttatgagcaggttgtcatggattatcttgataacctgaagcctagagtggaagcacctaaacaagaggagccaccaaacacagaagattccaaaactgaggagaaatctgtcgtacagaagcctgtcgatgtgaagccaaaaattaaggcctgcattgatgaggttaccacaacactggaagaaactaagtttcttaccaataagttactcttgtttgctgatatcaatggtaagctttaccatgattctcagaacatgcttagaggtgaagatatgtctttccttgagaaggatgcaccttacatggtaggtgatgttatcactagtggtgatatcacttgtgttgtaataccctccaaaaaggctggtggcactactgagatgctctcaagagctttgaagaaagtgccagttgatgagtatataaccacgtaccctggacaaggatgtgctggttatacacttgaggaagctaagactgctcttaagaaatgcaaatctgcattttatgtactaccttcagaagcacctaatgctaaggaagagattctaggaactgtatcctggaatttgagagaaatgcttgctcatgctgaagagacaagaaaattaatgcctatatgcatggatgttagagccataatggcaaccatccaacgtaagtataaaggaattaaaattcaagagggcatcgttgactatggtgtccgattcttcttttatactagtaaagagcctgtagcttctattattacgaagctgaactctctaaatgagccgcttgtcacaatgccaattggttatgtgacacatggttttaatcttgaagaggctgcgcgctgtatgcgttctcttaaagctcctgccgtagtgtcagtatcatcaccagatgctgttactacatataatggatacctcacttcgtcatcaaagacatctgaggagcactttgtagaaacagtttctttggctggctcttacagagattggtcctattcaggacagcgtacagagttaggtgttgaatttcttaagcgtggtgacaaaattgtgtaccacactctggagagccccgtcgagtttcatcttgacggtgaggttctttcacttgacaaactaaagagtctcttatccctgcgggaggttaagactataaaagtgttcacaactgtggacaacactaatctccacacacagcttgtggatatgtctatgacatatggacagcagtttggtccaacatacttggatggtgctgatgttacaaaaattaaacctcatgtaaatcatgagggtaagactttctttgtactacctagtgatgacacactacgtagtgaagctttcgagtactaccatactcttgatgagagttttcttggtaggtacatgtctgctttaaaccacacaaagaaatggaaatttcctcaagttggtggtttaacttcaattaaatgggctgataacaattgttatttgtctagtgttttattagcacttcaacagcttgaagtcaaattcaatgcaccagcacttcaagaggcttattatagagcccgtgctggtgatgctgctaacttttgtgcactcatactcgcttacagtaataaaactgttggcgagcttggtgatgtcagagaaactatgacccatcttctacagcatgctaatttggaatctgccaagcgagttcttaatgtggtgtgtaaacattgtggtcagaaaactactaccttaacgggtgtagaagctgtgatgtatatgggtactctatcttatgataatcttaagacaggtgtttcccttccatgtgtgtgtggtcgtgatgctacacaatatctagtaccaccagagtcttcttttgttatgatgtctgcaccacctgctgagtataaattacagcaaggtacattcttatgtgcgaatgagtacactggtaactatcagtgtggtcattacactcatataactgctaaggagaccctctatcgtattgacggagctcaccttacaaagatgtcagagtacaaaggaccagtgactgatgttttctacaaggaaacatcttacactacaaccatcaagcctgtgtcgtataaactcgatggagttacttacacagagattgaaccaaaattggatgggtattataaaaaggataatgcttactatacagagcagcctatagaccttgtaccaactcaaccattaccaaatgcgagttttgataatttcaaactcacatgttctaacacaaaatttgctgatgatttaaatcaaatgacaggcttcacaaagccagcttcacgagagctatctgtcacattcttcccagacttgaatggcgatgtagtggctattgactatagacactattcagcgagtttcaagaaaggtgctaaattactgcataagccaattgtttggcacattaaccaggctacaaccaagacaacgttcaaaccaaacacttggtgtttacgttgtctttggagtacaaagccagtagatacttcaaattcatttgaagttctggcagtagaagacacacaaggaatggacaatcttgcttgtgaaagtcaacaacccacctctgaagaagtagtggaaaatcctaccatacagaaggaagtcatagagtgtgacgtgaaaactaccgaagttgtaggcaatgtcatacttaaaccatcagatgaaggtgttaaagtaacacaagagttaggtcatgaggatcttatggctgcttatgtggaaaacacaagcattaccattaagaaacctaatgagctttcactagccttaggtttaaaaacaattgccactcatggtattgctgcaattaatagtgttccttggagtaaaattttggcttatgtcaaaccattcttaggacaagcagcaattacaacatcaaattgcgctaagagattagcacaacgtgtgtttaacaattatatgccttatgtgtttacattattgttccaattgtgtacttttactaaaagtaccaattctagaattagagcttcactacctacaactattgctaaaaatagtgttaagagtgttgctaaattatgtttggatgccggcattaattatgtgaagtcacccaaattttctaaattgttcacaatcgctatgtggctattgttgttaagtatttgcttaggttctctaatctgtgtaactgctgcttttggtgtactcttatctaattttggtgctccttcttattgtaatggcgttagagaattgtatcttaattcgtctaacgttactactatggatttctgtgaaggttcttttccttgcagcatttgtttaagtggattagactcccttgattcttatccagctcttgaaaccattcaggtgacgatttcatcgtacaagctagacttgacaattttaggtctggccgctgagtgggttttggcatatatgttgttcacaaaattcttttatttattaggtctttcagctataatgcaggtgttctttggctattttgctagtcatttcatcagcaattcttggctcatgtggtttatcattagtattgtacaaatggcacccgtttctgcaatggttaggatgtacatcttctttgcttctttctactacatatggaagagctatgttcatatcatggatggttgcacctcttcgacttgcatgatgtgctataagcgcaatcgtgccacacgcgttgagtgtacaactattgttaatggcatgaagagatctttctatgtctatgcaaatggaggccgtggcttctgcaagactcacaattggaattgtctcaattgtgacacattttgcactggtagtacattcattagtgatgaagttgctcgtgatttgtcactccagtttaaaagaccaatcaaccctactgaccagtcatcgtatattgttgatagtgttgctgtgaaaaatggcgcgcttcacctctactttgacaaggctggtcaaaagacctatgagagacatccgctctcccattttgtcaatttagacaatttgagagctaacaacactaaaggttcactgcctattaatgtcatagtttttgatggcaagtccaaatgcgacgagtctgcttctaagtctgcttctgtgtactacagtcagctgatgtgccaacctattctgttgcttgaccaagctcttgtatcagacgttggagatagtactgaagtttccgttaagatgtttgatgcttatgtcgacaccttttcagcaacttttagtgttcctatggaaaaacttaaggcacttgttgctacagctcacagcgagttagcaaagggtgtagctttagatggtgtcctttctacattcgtgtcagctgcccgacaaggtgttgttgataccgatgttgacacaaaggatgttattgaatgtctcaaactttcacatcactctgacttagaagtgacaggtgacagttgtaacaatttcatgctcacctataataaggttgaaaacatgacgcccagagatcttggcgcatgtattgactgtaatgcaaggcatatcaatgcccaagtagcaaaaagtcacaatgtttcactcatctggaatgtaaaagactacatgtctttatctgaacagctgcgtaaacaaattcgtagtgctgccaagaagaacaacataccttttagactaacttgtgctacaactagacaggttgtcaatgtcataactactaaaatctcactcaagggtggtaagattgttagtacttgttttaaacttatgcttaaggccacattattgtgcgttcttgctgcattggtttgttatatcgttatgccagtacatacattgtcaatccatgatggttacacaaatgaaatcattggttacaaagccattcaggatggtgtcactcgtgacatcatttctactgatgattgttttgcaaataaacatgctggttttgacgcatggtttagccagcgtggtggttcatacaaaaatgacaaaagctgccctgtagtagctgctatcattacaagagagattggtttcatagtgcctggcttaccgggtactgtgctgagagcaatcaatggtgacttcttgcattttctacctcgtgtttttagtgctgttggcaacatttgctacacaccttccaaactcattgagtatagtgattttgctacctctgcttgcgttcttgctgctgagtgtacaatttttaaggatgctatgggcaaacctgtgccatattgttatgacactaatttgctagagggttctatttcttatagtgagcttcgtccagacactcgttatgtgcttatggatggttccatcatacagtttcctaacacttacctggagggttctgttagagtagtaacaacttttgatgctgagtactgtagacatggtacatgcgaaaggtcagaagtaggtatttgcctatctaccagtggtagatgggttcttaataatgagcattacagagctctatcaggagttttctgtggtgttgatgcgatgaatctcatagctaacatctttactcctcttgtgcaacctgtgggtgctttagatgtgtctgcttcagtagtggctggtggtattattgccatattggtgacttgtgctgcctactactttatgaaattcagacgtgcttttggtgagtacaaccatgttgttgctgctaatgcacttttgtttttgatgtctttcactatactctgtctggtaccagcttacagctttctgccgggagtctactcagtcttttacttgtacttgacattctatttcaccaatgatgtttcattcttggctcaccttcaatggtttgccatgttttctcctattgtgcctttttggataacagcaatctatgtattctgtatttctctgaagcactgccattggttctttaacaactatcttaggaaaagagtcatgtttaatggagttacatttagtaccttcgaggaggctgctttgtgtacctttttgctcaacaaggaaatgtacctaaaattgcgtagcgagacactgttgccacttacacagtataacaggtatcttgctctatataacaagtacaagtatttcagtggagtcttagatactaccagctatcgtgaagcagcttgctgccacttagcaaaggctctaaatgactttagcaactcaggtgctgatgttctctaccaaccaccacagacatcaatcacttctgctgttctgcagagtggttttaggaaaatggcattcccgtcaggcaaagttgaagggtgcatggtacaagtaacctgtggaactacaactcttaatggattgtggttggatgacacagtatactgtccaagacatgtcatttgcacagcagaagacatgcttaatcctaactatgaagatctgctcattcgcaaatccaaccatagctttcttgttcaggctggcaatgttcaacttcgtgttattggccattctatgcaaaattgtctgcttaggcttaaagttgatacttctaaccctaagacacccaagtataaatttgtccgtatccaacctggtcaaacattttcagttctagcatgctacaatggttcaccatctggtgtttatcagtgtgccatgagacctaatcataccattaaaggttctttccttaatggatcatgtggtagtgttggttttaacattgattatgattgcgtgtctttctgctatatgcatcatatggagcttccaacaggagtacacgctggtactgacttagaaggtaaattctatggtccatttgttgacagacaaactgcacaggctgcaggtacagacacaaccataacattaaatgttttggcatggctgtatgctgctgttatcaatggtgataggtggtttcttaatagattcaccactactttgaatgactttaaccttgtggcaatgaagtacaactatgaacctttgacacaagatcatgttgacatattgggacctctttctgctcaaacaggaattgccgtcttagatatgtgtgctgctttgaaagagctgctgcagaatggtatgaatggtcgtactatccttggtagcactattttagaagatgagtttacaccatttgatgttgttagacaatgctctggtgttaccttccaaggtaagttcaagaaaattgttaagggcactcatcattggatgcttttaactttcttgacatcactattgattcttgttcaaagtacacagtggtcactgtttttctttgtttacgagaatgctttcttgccatttactcttggtattatggcaattgctgcatgtgctatgctgcttgttaagcataagcacgcattcttgtgcttgtttctgttaccttctcttgcaacagttgcttactttaatatggtctacatgcctgctagctgggtgatgcgtatcatgacatggcttgaattggctgacactagcttgtctggttataggcttaaggattgtgttatgtatgcttcagctttagttttgcttattctcatgacagctcgcactgtttatgatgatgctgctagacgtgtttggacactgatgaatgtcattacacttgtttacaaagtctactatggtaatgctttagatcaagctatttccatgtgggccttagttatttctgtaacctctaactattctggtgtcgttacgactatcatgtttttagctagagctatagtgtttgtgtgtgttgagtattacccattgttatttattactggcaacaccttacagtgtatcatgcttgtttattgtttcttaggctattgttgctgctgctactttggccttttctgtttactcaaccgttacttcaggcttactcttggtgtttatgactacttggtctctacacaagaatttaggtatatgaactcccaggggcttttgcctcctaagagtagtattgatgctttcaagcttaacattaagttgttgggtattggaggtaaaccatgtatcaaggttgctactgtacagtctaaaatgtctgacgtaaagtgcacatctgtggtactgctctcggttcttcaacaacttagagtagagtcatcttctaaattgtgggcacaatgtgtacaactccacaatgatattcttcttgcaaaagacacaactgaagctttcgagaagatggtttctcttttgtctgttttgctatccatgcagggtgctgtaaacattaataggttgtgcgaggaaatgctcgataaccgtgctactcttcaggctattgcttcagaatttagttctttaccatcatatgccgcttatgccactgcccaggaggcctatgagcaggctgtagctaatggtgattctgaagtcgttctcaaaaagttaaagaaatctttgaatgtggctaaatctgagtttgaccgtgatgctgccatgcaacgcaagttggaaaagatggcagatcaggctatgacccaaatgtacaaacaggcaagatctgaggacaagagggcaaaagtaactagtgctatgcaaacaatgctcttcactatgcttaggaagcttgataatgatgcacttaacaacattatcaacaatgcgcgtgatggttgtgttccactcaacatcataccattgactacagcagccaaactcatggttgttgtccctgattatggtacctacaagaacacttgtgatggtaacacctttacatatgcatctgcactctgggaaatccagcaagttgttgatgcggatagcaagattgttcaacttagtgaaattaacatggacaattcaccaaatttggcttggcctcttattgttacagctctaagagccaactcagctgttaaactacagaataatgaactgagtccagtagcactacgacagatgtcctgtgcggctggtaccacacaaacagcttgtactgatgacaatgcacttgcctactataacaattcgaagggaggtaggtttgtgctggcattactatcagaccaccaagatctcaaatgggctagattccctaagagtgatggtacaggtacaatttacacagaactggaaccaccttgtaggtttgttacagacacaccaaaagggcctaaagtgaaatacttgtacttcatcaaaggcttaaacaacctaaatagaggtatggtgctgggcagtttagctgctacagtacgtcttcaggctggaaatgctacagaagtacctgccaattcaactgtgctttccttctgtgcttttgcagtagaccctgctaaagcatataaggattacctagcaagtggaggacaaccaatcaccaactgtgtgaagatgttgtgtacacacactggtacaggacaggcaattactgtaacaccagaagctaacatggaccaagagtcctttggtggtgcttcatgttgtctgtattgtagatgccacattgaccatccaaatcctaaaggattctgtgacttgaaaggtaagtacgtccaaatacctaccacttgtgctaatgacccagtgggttttacacttagaaacacagtctgtaccgtctgcggaatgtggaaaggttatggctgtagttgtgaccaactccgcgaacccttgatgcagtctgcggatgcatcaacgtttttaaacgggtttgcggtgtaagtgcagcccgtcttacaccgtgcggcacaggcactagtactgatgtcgtctacagggcttttgatatttacaacgaaaaagttgctggttttgcaaagttcctaaaaactaattgctgtcgcttccaggagaaggatgaggaaggcaatttattagactcttactttgtagttaagaggcatactatgtctaactaccaacatgaagagactatttataacttggttaaagattgtccagcggttgctgtccatgactttttcaagtttagagtagatggtgacatggtaccacatatatcacgtcagcgtctaactaaatacacaatggctgatttagtctatgctctacgtcattttgatgagggtaattgtgatacattaaaagaaatactcgtcacatacaattgctgtgatgatgattatttcaataagaaggattggtatgacttcgtagagaatcctgacatcttacgcgtatatgctaacttaggtgagcgtgtacgccaatcattattaaagactgtacaattctgcgatgctatgcgtgatgcaggcattgtaggcgtactgacattagataatcaggatcttaatgggaactggtacgatttcggtgatttcgtacaagtagcaccaggctgcggagttcctattgtggattcatattactcattgctgatgcccatcctcactttgactagggcattggctgctgagtcccatatggatgctgatctcgcaaaaccacttattaagtgggatttgctgaaatatgattttacggaagagagactttgtctcttcgaccgttattttaaatattgggaccagacataccatcccaattgtattaactgtttggatgataggtgtatccttcattgtgcaaactttaatgtgttattttctactgtgtttccacctacaagttttggaccactagtaagaaaaatatttgtagatggtgttccttttgttgtttcaactggataccattttcgtgagttaggagtcgtacataatcaggatgtaaacttacatagctcgcgtctcagtttcaaggaacttttagtgtatgctgctgatccagctatgcatgcagcttctggcaatttattgctagataaacgcactacatgcttttcagtagctgcactaacaaacaatgttgcttttcaaactgtcaaacccggtaattttaataaagacttttatgactttgctgtgtctaaaggtttctttaaggaaggaagttctgttgaactaaaacacttcttctttgctcaggatggcaacgctgctatcagtgattatgactattatcgttataatctgccaacaatgtgtgatatcagacaactcctattcgtagttgaagttgttgataaatactttgattgttacgatggtggctgtattaatgccaaccaagtaatcgttaacaatctggataaatcagctggtttcccatttaataaatggggtaaggctagactttattatgactcaatgagttatgaggatcaagatgcacttttcgcgtatactaagcgtaatgtcatccctactataactcaaatgaatcttaagtatgccattagtgcaaagaatagagctcgcaccgtagctggtgtctctatctgtagtactatgacaaatagacagtttcatcagaaattattgaagtcaatagccgccactagaggagctactgtggtaattggaacaagcaagttttacggtggctggcataatatgttaaaaactgtttacagtgatgtagaaactccacaccttatgggttgggattatccaaaatgtgacagagccatgcctaacatgcttaggataatggcctctcttgttcttgctcgcaaacataacacttgctgtaacttatcacaccgtttctacaggttagctaacgagtgtgcgcaagtattaagtgagatggtcatgtgtggcggctcactatatgttaaaccaggtggaacatcatccggtgatgctacaactgcttatgctaatagtgtctttaacatttgtcaagctgttacagccaatgtaaatgcacttctttcaactgatggtaataagatagctgacaagtatgtccgcaatctacaacacaggctctatgagtgtctctatagaaatagggatgttgatcatgaattcgtggatgagttttacgcttacctgcgtaaacatttctccatgatgattctttctgatgatgccgttgtgtgctataacagtaactatgcggctcaaggtttagtagctagcattaagaactttaaggcagttctttattatcaaaataatgtgttcatgtctgaggcaaaatgttggactgagactgaccttactaaaggacctcacgaattttgctcacagcatacaatgctagttaaacaaggagatgattacgtgtacctgccttacccagatccatcaagaatattaggcgcaggctgttttgtcgatgatattgtcaaaacagatggtacacttatgattgaaaggttcgtgtcactggctattgatgcttacccacttacaaaacatcctaatcaggagtatgctgatgtctttcacttgtatttacaatacattagaaagttacatgatgagcttactggccacatgttggacatgtattccgtaatgctaactaatgataacacctcacggtactgggaacctgagttttatgaggctatgtacacaccacatacagtcttgcaggctgtaggtgcttgtgtattgtgcaattcacagacttcacttcgttgcggtgcctgtattaggagaccattcctatgttgcaagtgctgctatgaccatgtcatttcaacatcacacaaattagtgttgtctgttaatccctatgtttgcaatgccccaggttgtgatgtcactgatgtgacacaactgtatctaggaggtatgagctattattgcaagtcacataagcctcccattagttttccattatgtgctaatggtcaggtttttggtttatacaaaaacacatgtgtaggcagtgacaatgtcactgacttcaatgcgatagcaacatgtgattggactaatgctggcgattacatacttgccaacacttgtactgagagactcaagcttttcgcagcagaaacgctcaaagccactgaggaaacatttaagctgtcatatggtattgccactgtacgcgaagtactctctgacagagaattgcatctttcatgggaggttggaaaacctagaccaccattgaacagaaactatgtctttactggttaccgtgtaactaaaaatagtaaagtacagattggagagtacacctttgaaaaaggtgactatggtgatgctgttgtgtacagaggtactacgacatacaagttgaatgttggtgattactttgtgttgacatctcacactgtaatgccacttagtgcacctactctagtgccacaagagcactatgtgagaattactggcttgtacccaacactcaacatctcagatgagttttctagcaatgttgcaaattatcaaaaggtcggcatgcaaaagtactctacactccaaggaccacctggtactggtaagagtcattttgccatcggacttgctctctattacccatctgctcgcatagtgtatacggcatgctctcatgcagctgttgatgccctatgtgaaaaggcattaaaatatttgcccatagataaatgtagtagaatcatacctgcgcgtgcgcgcgtagagtgttttgataaattcaaagtgaattcaacactagaacagtatgttttctgcactgtaaatgcattgccagaaacaactgctgacattgtagtctttgatgaaatctctatggctactaattatgacttgagtgttgtcaatgctagacttcgtgcaaaacactacgtctatattggcgatcctgctcaattaccagccccccgcacattgctgactaaaggcacactagaaccagaatattttaattcagtgtgcagacttatgaaaacaataggtccagacatgttccttggaacttgtcgccgttgtcctgctgaaattgttgacactgtgagtgctttagtttatgacaataagctaaaagcacacaaggagaagtcagctcaatgcttcaaaatgttctacaaaggtgttattacacatgatgtttcatctgcaatcaacagacctcaaataggcgttgtaagagaatttcttacacgcaatcctgcttggagaaaagctgtttttatctcaccttataattcacagaacgctgtagcttcaaaaatcttaggattgcctacgcagactgttgattcatcacagggttctgaatatgactatgtcatattcacacaaactactgaaacagcacactcttgtaatgtcaaccgcttcaatgtggctatcacaagggcaaaaattggcattttgtgcataatgtctgatagagatctttatgacaaactgcaatttacaagtctagaaataccacgtcgcaatgtggctacattacaagcagaaaatgtaactggactttttaaggactgtagtaagatcattactggtcttcatcctacacaggcacctacacacctcagcgttgatataaagttcaagactgaaggattatgtgttgacataccaggcataccaaaggacatgacctaccgtagactcatctctatgatgggtttcaaaatgaattaccaagtcaatggttaccctaatatgtttatcacccgcgaagaagctattcgtcacgttcgtgcgtggattggctttgatgtagagggctgtcatgcaactagagatgctgtgggtactaacctacctctccagctaggattttctacaggtgttaacttagtagctgtaccgactggttatgttgacactgaaaataacacagaattcaccagagttaatgcaaaacctccaccaggtgaccagtttaaacatcttataccactcatgtataaaggcttgccctggaatgtagtgcgtattaagatagtacaaatgctcagtgatacactgaaaggattgtcagacagagtcgtgttcgtcctttgggcgcatggctttgagcttacatcaatgaagtactttgtcaagattggacctgaaagaacgtgttgtctgtgtgacaaacgtgcaacttgcttttctacttcatcagatacttatgcctgctggaatcattctgtgggttttgactatgtctataacccatttatgattgatgttcagcagtggggctttacgggtaaccttcagagtaaccatgaccaacattgccaggtacatggaaatgcacatgtggctagttgtgatgctatcatgactagatgtttagcagtccatgagtgctttgttaagcgcgttgattggtctgttgaataccctattataggagatgaactgagggttaattctgcttgcagaaaagtacaacacatggttgtgaagtctgcattgcttgctgataagtttccagttcttcatgacattggaaatccaaaggctatcaagtgtgtgcctcaggctgaagtagaatggaagttctacgatgctcagccatgtagtgacaaagcttacaaaatagaggaactcttctattcttatgctacacatcacgataaattcactgatggtgtttgtttgttttggaattgtaacgttgatcgttacccagccaatgcaattgtgtgtaggtttgacacaagagtcttgtcaaacttgaacttaccaggctgtgatggtggtagtttgtatgtgaataagcatgcattccacactccagctttcgataaaagtgcatttactaatttaaagcaattgcctttcttttactattctgatagtccttgtgagtctcatggcaaacaagtagtgtcggatattgattatgttccactcaaatctgctacgtgtattacacgatgcaatttaggtggtgctgtttgcagacaccatgcaaatgagtaccgacagtacttggatgcatataatatgatgatttctgctggatttagcctatggatttacaaacaatttgatacttataacctgtggaatacatttaccaggttacagagtttagaaaatgtggcttataatgttgttaataaaggacactttgatggacacgccggcgaagcacctgtttccatcattaataatgctgtttacacaaaggtagatggtattgatgtggagatctttgaaaataagacaacacttcctgttaatgttgcatttgagctttgggctaagcgtaacattaaaccagtgccagagattaagatactcaataatttgggtgttgatatcgctgctaatactgtaatctgggactacaaaagagaagccccagcacatgtgtctacaataggtgtctgcacaatgactgacattgccaagaaacctactgagagtgcttgttcttcacttactgtcttgtttgatggtagagtggaaggacaggtagacctttttagaaacgcccgtaatggtgttttaataacagaaggttcagtcaaaggtctaacaccttcaaagggaccagcacaagctagcgtcaatggagtcacattaattggagaatcagtaaaaacacagtttaactactttaagaaagtagacggcattattcaacagttgcctgaaacctactttactcagagcagagacttagaggattttaagcccagatcacaaatggaaactgactttctcgagctcgctatggatgaattcatacagcgatataagctcgagggctatgccttcgaacacatcgtttatggagatttcagtcatggacaacttggcggtcttcatttaatgataggcttagccaagcgctcacaagattcaccacttaaattagaggattttatccctattgacagcacagtgaaaaattacttcataacagatgcgcaaacaggttcatcaaaatgtgtgtgttctgtgattgatcttttacttgatgactttgtcgagataataaagtcacaagatttgtcagtgatttcaaaagtggtcaaggttacaattgactatgctgaaatttcattcatgctttggtgtaaggatggacatgttgaaaccttctacccaaaactacaagcaagtcaagcgtggcaaccaggtgttgcgatgcctaacttgtacaagatgcaaagaatgcttcttgaaaagtgtgaccttcagaattatggtgaaaatgctgttataccaaaaggaataatgatgaatgtcgcaaagtatactcaactgtgtcaatacttaaatacacttactttagctgtaccctacaacatgagagttattcactttggtgctggctctgataaaggagttgcaccaggtacagctgtgctcagacaatggttgccaactggcacactacttgtcgattcagatcttaatgacttcgtctccgacgcagattctactttaattggagactgtgcaacagtacatacggctaataaatgggaccttattattagcgatatgtatgaccctaggaccaaacatgtgacaaaagagaatgactctaaagaagggtttttcacttatctgtgtggatttataaagcaaaaactacccctgggtggttctatagctgtaaagataacagagcattcttggaatgctgacctttacaagcttatgggccatttctcatggtggacagcttttgttacaaatgtaaatgcatcatcatcggaagcatttttaattggggctaactatcttggcaagccgaaggaacaaattgatggctataccatgcatgctaactacattttctggaggaacacaaatcctatccagttgtcttcctattcactctttgacatgagcaaatttcctcttaaattaagaggaactgctgtaatgtctcttaaggagaatcaaatcaatgatatgatttattctcttctggaaaaaggtaggcttatcattagagaaaacaacagagttgtggtttcaagtgatattcttgttaacaactaaacgaacatgtttattttcttattatttcttactctcactagtggtagtgaccttgaccggtgcaccacttttgatgatgttcaagctcctaattacactcaacatacttcatctatgaggggggtttactatcctgatgaaatttttagatcagacactctttatttaactcaggatttatttcttccattttattctaatgttacagggtttcatactattaatcatacgtttgacaaccctgtcataccttttaaggatggtatttattttgctgccacagagaaatcaaatgttgtccgtggttgggtttttggttctaccatgaacaacaagtcacagtcggtgattattattaacaattctactaatgttgttatacgagcatgtaactttgaattgtgtgacaaccctttctttgctgtttctaaacccctgggtacacagacacatactatgatattcgataatgcatttaattgcactttcgagtacatatctgatgccttttcgcttgatgtttcagaaaagtcaggtaattttaaacacttacgagagtttgtgtttaaaaataaagatgggtttctctatgtttataagggctatcaacctatagatgtagttcgtgatctaccttctggttttaacactttgaaacctatttttaagttgcctcttggtattaacattacaaattttagagccattcttacagccttttcacctgctcaagacacttggggcacgtcagctgcagcctattttgttggctatttaaagccaactacatttatgctcaagtatgatgaaaatggtacaatcacagatgctgttgattgttctcaaaatccacttgctgaactcaaatgctctgttaagagctttgagattgacaaaggaatttaccagacctctaatttcagggttgttccctcaggagatgttgtgagattccctaatattacaaacttgtgtccttttggagaggtttttaatgctactaaattcccttctgtctatgcatgggagagaaaaaaaatttctaattgtgttgctgattactctgtgctctacaactcaacatttttttcaacctttaagtgctatggcgtttctgccactaagttgaatgatctttgcttctccaatgtctatgcagattcttttgtagtcaagggagatgatgtaagacaaatagcgccaggacaaactggtgttattgctgattataattataaattgccagatgatttcatgggttgtgtccttgcttggaatactaggaacattgatgctacttcaactggtaattataattataaatataggtatcttagacatggcaagcttaggccctttgagagagacatatctaatgtgcctttctcccctgatggcaaaccttgcaccccacctgctcttaattgttattggccattaaatgattatggtttttacaccactactggcattggctaccaaccttacagagttgtagtactttcttttgaacttttaaatgcaccggccacggtttgtggaccaaaattatccactgaccttattaagaaccagtgtgtcaattttaattttaatggactcactggtactggtgtgttaactccttcttcaaagagatttcaaccatttcaacaatttggccgtgatgtttctgatttcactgattccgttcgagatcctaaaacatctgaaatattagacatttcaccttgctcttttgggggtgtaagtgtaattacacctggaacaaatgcttcatctgaagttgctgttctatatcaagatgttaactgcactgatgtttctacagcaattcatgcagatcaactcacaccagcttggcgcatatattctactggaaacaatgtattccagactcaagcaggctgtcttataggagctgagcatgtcgacacttcttatgagtgcgacattcctattggagctggcatttgtgctagttaccatacagtttctttattacgtagtactagccaaaaatctattgtggcttatactatgtctttaggtgctgatagttcaattgcttactctaataacaccattgctatacctactaacttttcaattagcattactacagaagtaatgcctgtttctatggctaaaacctccgtagattgtaatatgtacatctgcggagattctactgaatgtgctaatttgcttctccaatatggtagcttttgcacacaactaaatcgtgcactctcaggtattgctgctgaacaggatcgcaacacacgtgaagtgttcgctcaagtcaaacaaatgtacaaaaccccaactttgaaatattttggtggttttaatttttcacaaatattacctgaccctctaaagccaactaagaggtcttttattgaggacttgctctttaataaggtgacactcgctgatgctggcttcatgaagcaatatggcgaatgcctaggtgatattaatgctagagatctcatttgtgcgcagaagttcaatggacttacagtgttgccacctctgctcactgatgatatgattgctgcctacactgctgctctacttcgtggtactgccactgctggatggacatttggtgctggcgctgctcttcaaataccttttgctatgcaaatggcatataggttcaatggcattggagttacccaaaatgttctctatgagaaccaaaaacaaatcgccaaccaatttaacaaggcgattagtcaaattcaagaatcacttacaacaacatcaactgcattgggcaagctgcaagacgttgttaaccagaatgctcaagcattaaacacacttgttaaacaacttagctctaattttggtgcaatttcaagtgtgctaaatgatatcctttcgcgacttgataaagtcgaggcggaggtacaaattgacaggttaattacaggcagacttcaaagccttcaaacctatgtaacacaacaactaatcagggctgctgaaatcagggcttctgctaatcttgctgctactaaaatgtctgagtgtgttcttggacaatcaaaaagagttgacttttgtggaaagggctaccaccttatgtccttcccacaagcagccccgcatggtgttgtcttcctacatgtcacgtatgtgccatcccaggagaggaacttcaccacagcgccagcaatttgtcatgaaggcaaagcatacttccctcgtgaaggtgtttttgtgtttaatggcacttcttggtttattacacagaggaacttcttttctccacaaataattactacagacaatacatttgtctcaggaaattgtgatgtcgttattggcatcattaacaacacagtttatgatcctctgcaacctgagcttgactcattcaaagaagagctggacaagtacttcaaaaatcatacatcaccagatgttgatcttggcgacatttcaggcattaacgcttctgtcgtcaacattcaaaaagaaattgaccgcctcaatgaggtcgctaaaaatttaaatgaatcactcattgaccttcaagaattgggaaaatatgagcaatatattaaatggccttggtatgtttggctcggcttcattgctggactaattgccatcgtcatggttacaatcttgctttgttgcatgactagttgttgcagttgcctcaagggtgcatgctcttgtggttcttgctgcaagtttgatgaggatgactctgagccagttctcaagggtgtcaaattacattacacataaacgaacttatggatttgtttatgagattttttactcttgaatcaattactgcacagccagtaaaaattgacaatgcttctcctgcaagtactgttcatgctacagcaacgataccgctacaagcctcactccctttcggatggcttgttattggcgttgcatttcttgctgtttttcagagcgctaccaaaataattgcgctcaataaaagatggcagctagccctttataagggcttccagttcatttgcaatttactgctgctatttgttaccatctattcacatcttttgcttgtcgctgcaggtatggaggcgcaatttttgtacctctatgccttgatatattttctacaatgcatcaacgcatgtagaattattatgagatgttggctttgttggaagtgcaaatccaagaacccattactttatgatgccaactactttgtttgctggcacacacataactatgactactgtataccatataacagtgtcacagatacaattgtcgttactgaaggtgacggcatttcaacaccaaaactcaaagaagactaccaaattggtggttattctgaggataggcactcaggtgttaaagactatgtcgttgtacatggctatttcaccgaagtttactaccagcttgagtctacacaaattactacagacactggtattgaaaatgctacattcttcatctttaacaagcttgttaaagacccaccgaatgtgcaaatacacacaatcgacggctcttcaggagttgctaatccagcaatggatcccatttatgatgagccgacgacgactactagcgtgcctttgtaagcacaagaaagtgagtacgaacttatgtactcattcgtttcggaagaaacaggtacgttaatagttaatagcgtacttctttttcttgctttcgtggtattcttgctagtcacactagccatccttactgcgcttcgattgtgtgcgtactgctgcaatattgttaacgtgagtttagtaaaaccaacggtttacgtctactcgcgtgttaaaaatctgaactcttctgaaggagttcctgatcttctggtctaaacgaactaactattattattattctgtttggaactttaacattgcttatcatggcagacaacggtactattaccgttgaggagcttaaacaactcctggaacaatggaacctagtaataggtttcctattcctagcctggattatgttactacaatttgcctattctaatcggaacaggtttttgtacataataaagcttgttttcctctggctcttgtggccagtaacacttgcttgttttgtgcttgctgctgtctacagaattaattgggtgactggcgggattgcgattgcaatggcttgtattgtaggcttgatgtggcttagctacttcgttgcttccttcaggctgtttgctcgtacccgctcaatgtggtcattcaacccagaaacaaacattcttctcaatgtgcctctccgggggacaattgtgaccagaccgctcatggaaagtgaacttgtcattggtgctgtgatcattcgtggtcacttgcgaatggccggacactccctagggcgctgtgacattaaggacctgccaaaagagatcactgtggctacatcacgaacgctttcttattacaaattaggagcgtcgcagcgtgtaggcactgattcaggttttgctgcatacaaccgctaccgtattggaaactataaattaaatacagaccacgccggtagcaacgacaatattgctttgctagtacagtaagtgacaacagatgtttcatcttgttgacttccaggttacaatagcagagatattgattatcattatgaggactttcaggattgctatttggaatcttgacgttataataagttcaatagtgagacaattatttaagcctctaactaagaagaattattcggagttagatgatgaagaacttatggagttagattatccataaaacgaacatgaaaattattctcttcctgacattgattgtatttacatcttgcgagctatatcactatcaggagtgtgttagaggtacgactgtactactaaaagaaccttgcccatcaggaacatacgagggcaattcaccatttcaccctcttgctgacaataaatttgcactaacttgcactagcacacactttgcttttgcttgtgctgacggtactcgacatacctatcagctgcgtgcaagatcagtttcaccaaaacttttcatcagacaagaggaggttcaacaagagctctactcgccactttttctcattgttgctgctctagtatttttaatactttgcttcaccattaagagaaagacagaatgaatgagctcactttaattgacttctatttgtgctttttagcctttctgctattccttgttttaataatgcttattatattttggttttcactcgaaatccaggatctagaagaaccttgtaccaaagtctaaacgaacatgaaacttctcattgttttgacttgtatttctctatgcagttgcatacgcactgtagtacagcgctgtgcatctaataaacctcatgtgcttgaagatccttgtaaggtacaacactaggggtaatacttatagcactgcttggctttgtgctctaggaaaggttttaccttttcatagatggcacactatggttcaaacatgcacacctaatgttactatcaactgtcaagatccagctggtggtgcgcttatagctaggtgttggtaccttcatgaaggtcaccaaactgctgcatttagagacgtacttgttgttttaaataaacgaacaaattaaaatgtctgataatggaccccaatcaaaccaacgtagtgccccccgcattacatttggtggacccacagattcaactgacaataaccagaatggaggacgcaatggggcaaggccaaaacagcgccgaccccaaggtttacccaataatactgcgtcttggttcacagctctcactcagcatggcaaggaggaacttagattccctcgaggccagggcgttccaatcaacaccaatagtggtccagatgaccaaattggctactaccgaagagctacccgacgagttcgtggtggtgacggcaaaatgaaagagctcagccccagatggtacttctattacctaggaactggcccagaagcttcacttccctacggcgctaacaaagaaggcatcgtatgggttgcaactgagggagccttgaatacacccaaagaccacattggcacccgcaatcctaattacaatgctgccaccgtgctacaacttcctcaaggaacaacattgccaaaaggcttctacgcagagggaagcagaggcggcagtcaagcctcttctcgctcctcatcacgtagtcgcggtaattcaagaaattcaactcctggcagcagtaggggaaattctcctgctcgaatggctagcggaggtggtgaaactgccctcgcgctattgctgctagacagattgaaccagcttgagagcaaagtttctggtaaaggccaacaacaacaaggccaaactgtcactaagaaatctgctgctgaggcatctaaaaagcctcgccaaaaacgtactgccacaaaacagtacaacgtcactcaagcatttgggagacgtggtccagaacaaacccaaggaaatttcggggaccaagacctaatcagacaaggaactgattacaaacattggccgcaaattgcacaatttgctccaagtgcctctgcattctttggaatgtcacgcattggcatggaagtcacaccttcgggaacatggctgacttatcatggagccattaaattggatgacaaagatccacaattcaaagacaacgtcatactgctgaacaagcacattgacgcatacaaaacattcccaccaacagagcctaaaaaggacaaaaagaaaaagactgatgaagctcagcctttgccgcagagacaaaagaagcagcccactgtgactcttcttcctgcggctgacatggatgatttctccagacaacttcaaaattccatgagtggagcttctgctgattcaactcaggcataaacactcatgatgaccacacaaggcagatgggctatgtaaacgttttcgcaattccgtttacgatacatagtctactcttgtgcagaatgaattctcgtaactaaacagcacaagtaggtttagttaactttaatctcacatagcaatctttaatcaatgtgtaacattagggaggacttgaaagagccaccacattttcatcgaggccacgcggagtacgatcgagggtacagtgaataatgctagggagagctgcctatatggaagagccctaatgtgtaaaattaattttagtagtgctatccccatgtgattttaatagcttcttaggagaatgacaaaaaaaaaaaaaaaaa

SEQ ID NO: 52 - DNA, 29732 bp, Coronavirus
tacccaggaaaagccaaccaacctcgatctcttgtagatctgttctctaaacgaactttaaaatctgtgtagctgtcgctcggctgcatgcctagtgcacctacgcagtataaacaataataaattttactgtcgttgacaagaaacgagtaactcgtccctcttctgcagactgcttacggtttcgtccgtgttgcagtcgatcatcagcatacctaggtttcgtccgggtgtgaccgaaaggtaagatggagagccttgttcttggtgtcaacgagaaaacacacgtccaactcagtttgcctgtccttcaggttagagacgtgctagtgcgtggcttcggggactctgtggaagaggccctatcggaggcacgtgaacacctcaaaaatggcacttgtggtctagtagagctggaaaaaggcgtactgccccagcttgaacagccctatgtgttcattaaacgttctgatgccttaagcaccaatcacggccacaaggtcgttgagctggttgcagaaatggacggcattcagtacggtcgtagcggtataacactgggagtactcgtgccacatgtgggcgaaaccccaattgcataccgcaatgttcttcttcgtaagaacggtaataagggagccggtggtcatagctatggcatcgatctaaagtcttatgacttaggtgacgagcttggcactgatcccattgaagattatgaacaaaactggaacactaagcatggcagtggtgcactccgtgaactcactcgtgagctcaatggaggtgcagtcactcgctatgtcgacaacaatttctgtggcccagatgggtaccctcttgattgcatcaaagattttctcgcacgcgcgggcaagtcaatgtgcactctttccgaacaacttgattacatcgagtcgaagagaggtgtctactgctgccgtgaccatgagcatgaaattgcctggttcactgagcgctctgataagagctacgagcaccagacacccttcgaaattaagagtgccaagaaatttgacactttcaaaggggaatgcccaaagtttgtgtttcctcttaactcaaaagtcaaagtcattcaaccacgtgttgaaaagaaaaagactgagggtttcatggggcgtatacgctctgtgtacccttttgcatctccacaggagtgtaacaatatgcacttgtctaccttgatgaaatgtaatcattgcgatgaagtttcatggcagacgtgcgactttctgaaagccacttgtgaacattgtggcactgaaaatttagttattgaaggacctactacatgtgggtacctacctactaatgctgtagtgaaaatgccatgtcctgcctgtcaagacccagagattggacctgagcatagtgttgcagattatcacaaccactcaaacattgaaactcgactccgcaagggaggtaggactagatgttttggaggctgtgtgtttgcctatgttggctgctataataagcgtgcctactgggttcctcgtgctagtgctgatattggctcaggccatactggcattactggtgacaatgtggagaccttgaatgaggatctccttgagatactgagtcgtgaacgtgttaacattaacattgttggcgattttcatttgaatgaagaggttgccatcattttggcatctttctctgcttctacaagtgcctttattgacactataaagagtcttgattacaagtctttcaaaaccattgttgagtcctgcggtaactataaagttaccaagggaaagcccgtaaaaggtgcttggaacattggacaacagagatcagttttaacaccactgtgtggttttccctcacaggctgctggtgttatcagatcaatttttgcgcgcacacttgatgcagcaaaccactcaattcctgatttgcaaagagcagctgtcaccatacttgatggtatttctgaacagtcattacgtcttgtcgacgccatggtttatacttcagacctgctcaccaacagtgtcattattatggcatatgtaactggtggtcttgtacaacagacttctcagtggttgtctaatcttttgggcactactgttgaaaaactcaggcctatctttgaatggattgaggcgaaacttagtgcaggagttgaatttctcaaggatgcttgggagattctcaaatttctcattacaggtgtttttgacatcgtcaagggtcaaatacaggttgcttcagataacatcaaggattgtgtaaaatgcttcattgatgttgttaacaaggcactcgaaatgtgcattgatcaagtcactatcgctggcgcaaagttgcgatcactcaacttaggtgaagtcttcatcgctcaaagcaagggactttaccgtcagtgtatacgtggcaaggagcagctgcaactactcatgcctcttaaggcaccaaaagaagtaacctttcttgaaggtgattcacatgacacagtacttacctctgaggaggttgttctcaagaacggtgaactcgaagcactcgagacgcccgttgatagcttcacaaatggagctatcgttggcacaccagtctgtgtaaatggcctcatgctcttagagattaaggacaaagaacaatactgcgcattgtctcctggtttactggctacaaacaatgtctttcgcttaaaagggggtgcaccaattaaaggtgtaacctttggagaagatactgtttgggaagttcaaggttacaagaatgtgagaatcacatttgagcttgatgaacgtgttgacaaagtgcttaatgaaaagtgctctgtctacactgttgaatccggtaccgaagttactgagtttgcatgtgttgtagcagaggctgttgtgaagactttacaaccagtttctgatctccttaccaacatgggtattgatcttgatgagtggagtgtagctacattctacttatttgatgatgctggtgaagaaaacttttcatcacgtatgtattgttccttttaccctccagatgaggaagaagaggacgatgcagagtgtgaggaagaagaaattgatgaaacctgtgaacatgagtacggtacagaggatgattatcaaggtctccctctggaatttggtgcctcagctgaaacagttcgagttgaggaagaagaagaggaagactggctggatgatactactgagcaatcagagattgagccagaaccagaacctacacctgaagaaccagttaatcagtttactggttatttaaaacttactgacaatgttgccattaaatgtgttgacatcgttaaggaggcacaaagtgctaatcctatggtgattgtaaatgctgctaacatacacctgaaacatggtggtggtgtagcaggtgcactcaacaaggcaaccaatggtgccatgcaaaaggagagtgatgattacattaagctaaatggccctcttacagtaggagggtcttgtttgctttctggacataatcttgctaagaagtgtctgcatgttgttggacctaacctaaatgcaggtgaggacatccagcttcttaaggcagcatatgaaaatttcaattcacaggacatcttacttgcaccattgttgtcagcaggcatatttggtgctaaaccacttcagtctttacaagtgtgcgtgcagacggttcgtacacaggtttatattgcagtcaatgacaaagctctttatgagcaggttgtcatggattatcttgataacctgaagcctagagtggaagcacctaaacaagaggagccaccaaacacagaagattccaaaactgaggagaaatctgtcgtacagaagcctgtcgatgtgaagccaaaaattaaggcctgcattgatgaggttaccacaacactggaagaaactaagtttcttaccaataagttactcttgtttgctgatatcaatggtaagctttaccatgattctcagaacatgcttagaggtgaagatatgtctttccttgagaaggatgcaccttacatggtaggtgatgttatcactagtggtgatatcacttgtgttgtaataccctccaaaaaggctggtggcactactgagatgctctcaagagctttgaagaaagtgccagttgatgagtatataaccacgtaccctggacaaggatgtgctggttatacacttgaggaagctaagactgctcttaagaaatgcaaatctgcattttatgtactaccttcagaagcacctaatgctaaggaagagattctaggaactgtatcctggaatttgagagaaatgcttgctcatgctgaagagacaagaaaattaatgcctatatgcatggatgttagagccataatggcaaccatccaacgtaagtataaaggaattaaaattcaagagggcatcgttgactatggtgtccgattcttcttttatactagtaaagagcctgtagcttctattattacgaagctgaactctctaaatgagccgcttgtcacaatgccaattggttatgtgacacatggttttaatcttgaagaggctgcgcgctgtatgcgttctcttaaagctcctgccgtagtgtcagtatcatcaccagatgctgttactacatataatggatacctcacttcgtcatcaaagacatctgaggagcactttgtagaaacagtttctttggctggctcttacagagattggtcctattcaggacagcgtacagagttaggtgttgaatttcttaagcgtggtgacaaaattgtgtaccacactctggagagccccgtcgagtttcatcttgacggtgaggttctttcacttgacaaactaaagagtctcttatccctgcgggaggttaagactataaaagtgttcacaactgtggacaacactaatctccacacacagcttgtggatatgtctatgacatatggacagcagtttggtccaacatacttggatggtgctgatgttacaaaaattaaacctcatgtaaatcatgagggtaagactttctttgtactacctagtgatgacacactacgtagtgaagctttcgagtactaccatactcttgatgagagttttcttggtaggtacatgtctgctttaaaccacacaaagaaatggaaatttcctcaagttggtggtttaacttcaattaaatgggctgataacaattgttatttgtctagtgttttattagcacttcaacagcttgaagtcaaattcaatgcaccagcacttcaagaggcttattatagagcccgtgctggtgatgctgctaacttttgtgcactcatactcgcttacagtaataaaactgttggcgagcttggtgatgtcagagaaactatgacccatcttctacagcatgctaatttggaatctgcaaagcgagttcttaatgtggtgtgtaaacattgtggtcagaaaactactaccttaacgggtgtagaagctgtgatgtatatgggtactctatcttatgataatcttaagacaggtgtttccattccatgtgtgtgtggtcgtgatgctacacaatatctagtacaacaagagtcttcttttgttatgatgtctgcaccacctgctgagtataaattacagcaaggtacattcttatgtgcgaatgagtacactggtaactatcagtgtggtcattacactcatataactgctaaggagaccctctatcgtattgacggagctcaccttacaaagatgtcagagtacaaaggaccagtgactgatgttttctacaaggaaacatcttacactacaaccatcaagcctgtgtcgtataaactcgatggagttacttacacagagattgaaccaaaattggatgggtattataaaaaggataatgcttactatacagagcagcctatagaccttgtaccaactcaaccattaccaaatgcgagttttgataatttcaaactcacatgttctaacacaaaatttgctgatgatttaaatcaaatgacaggcttcacaaagccagcttcacgagagctatctgtcacattcttcccagacttgaatggcgatgtagtggctattgactatagacactattcagcgagtttcaagaaaggtgctaaaatactgcataagccaattgtttggcacattaaccaggctacaaccaagacaacgttcaaaccaaacacttggtgtttacgttgtctttggagtacaaagccagtagatacttcaaattcatttgaagttctggcagtagaagacacacaaggaatggacaatcttgcttgtgaaagtcaacaacccacctctgaagaagtagtggaaaatcctaccatacagaaggaagtcatagagtgtgacgtgaaaactaccgaagttgtaggcaatgtcatacttaaaccatcagatgaaggtgttaaagtaacacaagagttaggtcatgaggatcttatggctgcttatgtggaaaacacaagcattaccattaagaaacctaatgagctttcactagccttaggtttaaaaacaattgccactcatggtattgctgcaattaatagtgttccttggagtaaaattttggcttatgtcaaaccattcttaggacaagcagcaattacaacatcaaattgcgctaagagattagcacaacgtgtgtttaacaattatatgccttatgtgtttacattattgttccaattgtgtacttttactaaaagtaccaattctagaattagagcttcactacctacaactattgctaaaaatagtgttaagagtgttgctaaattatgtttggatgccggcattaattatgtgaagtcacccaaattttctaaattgttcacaatcgctatgtggctattgttgttaagtatttgcttaggttctctaatctgtgtaactgctgcttttggtgtactcttatctaattttggtgctccttcttattgtaatggcgttagagaattgtatcttaattcgtctaacgttactactatggatttctgtgaaggttcttttccttgcagcatttgtttaagtggattagactcccttgattcttatccagctcttgaaaccattcaggtgacgatttcatcgtacaagctagacttgacaattttaggtctggccgctgagtgggttttggcatatatgttgttcacaaaattcttttatttattaggtctttcagctataatgcaggtgttctttggctattttgctagtcatttcatcagcaattcttggctcatgtggtttatcattagtattgtacaaatggcacccgtttctgcaatggttaggatgtacatcttctttgcttctttctactacatatggaagagctatgttcatatcatggatggttgcacctcttcgacttgcatgatgtgctataagcgcaatcgtgccacacgcgttgagtgtacaactattgttaatggcatgaagagatctttctatgtctatgcaaatggaggccgtggcttctgcaagactcacaattggaattgtctcaattgtgacacattttgcactggtagtacattcattagtgatgaagttgctcgtgatttgtcactccagtttaaaagaccaatcaaccctactgaccagtcatcgtatattgttgatagtgttgctgtgaaaaatggcgcgcttcacctctactttgacaaggctggtcaaaagacctatgagagacatccgctctcccattttgtcaatttagacaatttgagagctaacaacactaaaggttcactgcctattaatgtcatagtttttgatggcaagtccaaatgcgacgagtctgcttctaagtctgcttctgtgtactacagtcagctgatgtgccaacctattctgttgcttgaccaagctcttgtatcagacgttggagatagtactgaagtttccgttaagatgtttgatgcttatgtcgacaccttttcagcaacttttagtgttcctatggaaaaacttaaggcacttgttgctacagctcacagcgagttagcaaagggtgtagctttagatggtgtcctttctacattcgtgtcagctgcccgacaaggtgttgttgataccgatgttgacacaaaggatgttattgaatgtctcaaactttcacatcactctgacttagaagtgacaggtgacagttgtaacaatttcatgctcacctataataaggttgaaaacatgacgcccagagatcttggcgcatgtattgactgtaatgcaaggcatatcaatgcccaagtagcaaaaagtcacaatgtttcactcatctggaatgtaaaagactacatgtctttatctgaacagctgcgtaaacaaattcgtagtgctgccaagaagaacaacataccttttagactaacttgtgctacaactagacaggttgtcaatgtcataactactaaaatctcactcaagggtggtaagattgttagtacttgttttaaacttatgcttaaggccacattattgtgcgttcttgctgcattggtttgttatatcgttatgccagtacatacattgtcaatccatgatggttacacaaatgaaatcattggttacaaagccattcaggatggtgtcactcgtgacatcatttctactgatgattgttttgcaaataaacatgctggttttgacgcatggtttagccagcgtggtggttcatacaaaaatgacaaaagctgccctgtagtagctgctatcattacaagagagattggtttcatagtgcctggcttaccgggtactgtgctgagagcaatcaatggtgacttcttgcattttctacctcgtgtttttagtgctgttggcaacatttgctacacaccttccaaactcattgagtatagtgattttgctacctctgcttgcgttcttgctgctgagtgtacaatttttaaggatgctatgggcaaacctgtgccatattgttatgacactaatttgctagagggttctatttcttatagtgagcttcgtccagacactcgttatgtgcttatggatggttccatcatacagtttcctaacacttacctggagggttctgttagagtagtaacaacttttgatgctgagtactgtagacatggtacatgcgaaaggtcagaagtaggtatttgcctatctaccagtggtagatgggttcttaataatgagcattacagagctctatcaggagttttctgtggtgttgatgcgatgaatctcatagctaacatctttactcctcttgtgcaacctgtgggtgctttagatgtgtctgcttcagtagtggctggtggtattattgccatattggtgacttgtgctgcctactactttatgaaattcagacgtgtttttggtgagtacaaccatgttgttgctgctaatgcacttttgtttttgatgtctttcactatactctgtctggtaccagcttacagctttctgccgggagtctactcagtcttttacttgtacttgacattctatttcaccaatgatgtttcattcttggctcaccttcaatggtttgccatgttttctcctattgtgcctttttggataacagcaatctatgtattctgtatttctctgaagcactgccattggttctttaacaactatcttaggaaaagagtcatgtttaatggagttacatttagtaccttcgaggaggctgctttgtgtacctttttgctcaacaaggaaatgtacctaaaattgcgtagcgagacactgttgccacttacacagtataacaggtatcttgctctatataacaagtacaagtatttcagtggagtcttagatactaccagctatcgtgaagcagcttgctgccacttagcaaaggctctaaatgactttagcaactcaggtgctgatgttctctaccaaccaccacagacatcaatcacttctgctgttctgcagagtggttttaggaaaatggcattcccgtcaggcaaagttgaagggtgcatggtacaagtaacctgtggaactacaactcttaatggattgtggttggatgacacagtatactgtccaagacatgtcatttgcacagcagaagacatgcttaatcctaactatgaagatctgctcattcgcaaatccaaccatagctttcttgttcaggctggcaatgttcaacttcgtgttattggccattctatgcaaaattgtctgcttaggcttaaagttgatacttctaaccctaagacacccaagtataaatttgtccgtatccaacctggtcaaacattttcagttctagcatgctacaatggttcaccatctggtgtttatcagtgtgccatgagacctaatcataccattaaaggttctttccttaatggatcatgtggtagtgttggttttaacattgattatgattgcgtgtctttctgctatatgcatcatatggagcttccaacaggagtacacgctggtactgacttagaaggtaaattctatggtccatttgttgacagacaaactgcacaggctgcaggtacagacacaaccataacattaaatgttttggcatggctgtatgctgctgttatcaatggtgataggtggtttcttaatagattcaccactactttgaatgactttaaccttgtggcaatgaagtacaactatgaacctttgacacaagatcatgttgaaatattgggacctctttctgctcaaacaggaattgccgtcttagatatgtgtgctgctttgaaagagctgctgcagaatggtatgaatggtcgtactatccttggtagcactattttagaagatgagtttacaccatttgatgttgttagacaatgctctggtgttaccttccaaggtaagttcaagaaaattgttaagggcactcatcattggatgcttttaactttcttgacatcactattgattcttgttcaaagtacacagtggtcactgtttttctttgtttacgagaatgctttcttgccatttactcttggtattatggcaattgctgcatgtgctatgctgcttgttaagcataagcacgcattcttgtgcttgtttctgttaccttctcttgcaacagttgcttactttaatatggtctacatgcctgctagctgggtgatgcgtatcatgacatggcttgaattggctgacactagcttgtctggttataggcttaaggattgtgttatgtatgcttcagctttagttttgcttattctcatgacagctcgcactgtttatgatgatgctgctagacgtgtttggacactgatgaatgtcattacacttgtttacaaagtctactatggtaatgctttagatcaagctatttccatgtgggccttagttatttctgtaacctctaactattctggtgtcgttacgactatcatgtttttagctagagctatagtgtttgtgtgtgttgagtattacccattgttatttattactggcaacaccttacagtgtatcatgcttgtttattgtttcttaggctattgttgctgctgctactttggccttttctgtttactcaaccgttacttcaggcttactcttggtgtttatgactacttggtctctacacaagaatttaggtatatgaactcccaggggcttttgcctcctaagagtagtattgatgctttcaagcttaccattaagttgttgggtattggaggtaaaccatgtatcaaggttgctactgtacagtctaaaatgtctgacgtaaagtgcacatctgtggtactgctctcggttcttcaacaacttagagtagagtcatcttctaaattgtgggcacaatgtgtacaactccacaatgatattcttcttgcaaaagacacaactgaagctttcgagaagatggtttctcttttgtctgttttgctatccatgcagggtgctgtagacattaataggttgtgcgaggaaatgctcgataaccgtgctactcttcaggctattgcttcagaatttagttctttaccatcatatgccgcttatgccactgcccaggaggcctatgagcaggctgtagctaatggtgattctgaagtcgttctcaaaaagttaaagaaatctttgaatgtggctaaatctgagtttgaccgtgatgctgccatgcaacgcaagttggaaaagatggcagatcaggctatgacccaaatgtacaaacaggcaagatctgaggacaagagggcaaaagtaactagtgctatgcaaacaatgctcttcactatgcttaggaagcttgataatgatgcacttaacaacattatcaacaatgcgcgtgatggttgtgttccactcaacatcataccattgactacagcagccaaactcatggttgttgtccctgattatggtacctacaagaacacttgtgatggtaacacctttacatatgcatctgcactctgggaaatccagcaagttgttgatgcggatagcaagattgttcaacttagtgaaattaacatggacaattcaccaaatttggcttggcctcttattgttacagctctaagagccaactcagctgttaaactacagaataatgaactgagtccagtagcactacgacagatgtcctgtgcggctggtaccacacaaacagcttgtactgatgacaatgcacttgcctactataacaattcgaagggaggtaggtttgtgctggcattactatcagaccaccaagatctcaaatgggctagattccctaagagtgatggtacaggtacaatttacacagaactggaaccaccttgtaggtttgttacagacacaccaaaagggcctaaagtgaaatacttgtacttcatcaaaggcttaaacaacctaaatagaggtatggtgctgggcagtttagctgctacagtacgtcttcaggctggaaatgctacagaagtacctgccaattcaactgtgctttccttctgtgcttttgcagtagaccctgctaaagcatataaggattacctagcaagtggaggacaaccaatcaccaactgtgtgaagatgttgtgtacacacactggtacaggacaggcaattactgtaacaccagaagctaacatggaccaagagtcctttggtggtgcttcatgttgtctgtattgtagatgccacattgaccatccaaatcctaaaggattctgtgacttgaaaggtaagtacgtccaaatacctaccacttgtgctaatgacccagtgggttttacacttagaaacacagtctgtaccgtctgcggaatgtggaaaggttatggctgtagttgtgaccaactccgcgaacccttgatgcagtctgcggatgcatcaacgtttttaaacgggtttgcggtgtaagtgcagcccgtcttacaccgtgcggcacaggcactagtactgatgtcgtctacagggcttttgatatttacaacgaaaaagttgctggttttgcaaagttcctaaaaactaattgctgtcgcttccaggagaaggatgaggaaggcaatttattagactcttactttgtagttaagaggcatactatgtctaactaccaacatgaagagactatttataacttggttaaagattgtccagcggttgctgtccatgactttttcaagtttagagtagatggtgacatggtaccacatatatcacgtcagcgtctaactaaatacacaatggctgatttagtctatgctctacgtcattttgatgagggtaattgtgatacattaaaagaaatactcgtcacatacaattgctgtgatgatgattatttcaataagaaggattggtatgacttcgtagagaatcctgacatcttacgcgtatatgctaacttaggtgagcgtgtacgccaatcattattaaagactgtacaattctgcgatgctatgcgtgatgcaggcattgtaggcgtactgacattagataatcaggatcttaatgggaactggtacgatttcggtgatttcgtacaagtagcaccaggctgcggagttcctattgtggattcatattactcattgctgatgcccatcctcactttgactagggcattggctgctgagtcccatatggatgctgatctcgcaaaaccacttattaagtgggatttgctgaaatatgattttacggaagagagactttgtctcttcgaccgttattttaaatattgggaccagacataccatcccaattgtattaactgtttggatgataggtgtatccttcattgtgcaaactttaatgtgttattttctactgtgtttccacctacaagttttggaccactagtaagaaaaatatttgtagatggtgttccttttgttgtttcaactggataccattttcgtgagttaggagtcgtacataatcaggatgtaaacttacatagctcgcgtctcagtttcaaggaacttttagtgtatgctgctgatccagctatgcatgcagcttctggcaatttattgctagataaacgcactacatgcttttcagtagctgcactaacaaacaatgttgcttttcaaactgtcaaacccggtaattttaataaagacttttatgactttgctgtgtctaaaggtttctttaaggaaggaagttctgttgaactaaaacacttcttctttgctcaggatggcaacgctgctatcagtgattatgactattatcgttataatctgccaacaatgtgtgatatcagacaactcctattcgtagttgaagttgttgataaatactttgattgttacgatggtggctgtattaatgccaaccaagtaatcgttaacaatctggataaatcagctggtttcccatttaataaatggggtaaggctagactttattatgactcaatgagttatgaggatcaagatgcacttttcgcgtatactaagcgtaatgtcatccctactataactcaaatgaatcttaagtatgccattagtgcaaagaatagagctcgcaccgtagctggtgtctctatctgtagtactatgacaaatagacagtttcatcagaaattattgaagtcaatagccgccactagaggagctactgtggtaattggaacaagcaagttttacggtggctggcataatatgttaaaaactgtttacagtgatgtagaaactccacaccttatgggttgggattatccaaaatgtgacagagccatgcctaacatgcttaggataatggcctctcttgttcttgctcgcaaacataacacttgctgtaacttatcacaccgtttctacaggttagctaacgagtgtgcgcaagtattaagtgagatggtcatgtgtggcggctcactatatgttaaaccaggtggaacatcatccggtgatgctacaactgcttatgctaatagtgtctttaacatttgtcaagctgttacagccaatgtaaatgcacttctttcaactgatggtaataagatagctgacaagtatgtccgcaatctacaacacaggctctatgagtgtctctatagaaatagggatgttgatcatgaattcgtggatgagttttacgcttacctgcgtaaacatttctccatgatgattctttctgatgatgccgttgtgtgctataacagtaactatgcggctcaaggtttagtagctagcattaagaactttaaggcagttctttattatcaaaataatgtgttcatgtctgaggcaaaatgttggactgagactgaccttactaaaggacctcacgaattttgctcacagcatacaatgctagttaaacaaggagatgattacgtgtacctgccttacccagatccatcaagaatattaggcgcaggctgttttgtcgatgatattgtcaaaacagatggtacacttatgattgaaaggttcgtgtcactggctattgatgcttacccacttacaaaacatcctaatcaggagtatgctgatgtctttcacttgtatttacaatacattagaaagttacatgatgagcttactggccacatgttggacatgtattccgtaatgctaactaatgataacacctcacggtactgggaacctgagttttatgaggctatgtacacaccacatacagtcttgcaggctgtaggtgcttgtgtattgtgcaattcacagacttcacttcgttgcggtgcctgtattaggagaccattcctatgttgcaagtgctgctatgaccatgtcatttcaacatcacacaaattagtgttgtctgttaatccctatgtttgcaatgccccaggttgtgatgtcactgatgtgacacaactgtatctaggaggtatgagctattattgcaagtcacataagcctcccattagttttccattatgtgctaatggtcaggtttttggtttatacaaaaacacatgtgtaggcagtgacaatgtcactgacttcaatgcgatagcaacatgtgattggactaatgctggcgattacatacttgccaacacttgtactgagagactcaagcttttcgcagcagaaacgctcaaagccactgaggaaacatttaagctgtcatatggtattgccactgtacgcgaagtactctctgacagagaattgcatctttcatgggaggttggaaaacctagaccaccattgaacagaaactatgtctttactggttaccgtgtaactaaaaatagtaaagtacagattggagagtacacctttgaaaaaggtgactatggtgatgctgttgtgtacagaggtactacgacatacaagttgaatgttggtgattactttgtgttgacatctcacactgtaatgccacttagtgcacctactctagtgccacaagagcactatgtgagaattactggcttgtacccaacactcaacatctcagatgagttttctagcaatgttgcaaattatcaaaaggtcggcatgcaaaagtactctacactccaaggaccacctggtactggtaagagtcattttgccatcggacttgctctctattacccatctgctcgcatagtgtatacggcatgctctcatgcagctgttgatgccctatgtgaaaaggcattaaaatatttgcccatagataaatgtagtagaatcatacctgcgcgtgcgcgcgtagagtgttttgataaattcaaagtgaattcaacactagaacagtatgttttctgcactgtaaatgcattgccagaaacaactgctgacattgtagtctttgatgaaatctctatggctactaattatgacttgagtgttgtcaatgctagacttcgtgcaaaacactacgtctatattggcgatcctgctcaattaccagccccccgcacattgctgactaaaggcacactagaaccagaatattttaattcagtgtgcagacttatgaaaacaataggtccagacatgttccttggaacttgtcgccgttgtcctgctgaaattgttgacactgtgagtgctttagtttatgacaataagctaaaagcacacaaggagaagtcagctcaatgcttcaaaatgttctacaaaggtgttattacacatgatgtttcatctgcaatcaacagacctcaaataggcgttgtaagagaatttcttacacgcaatcctgcttggagaaaagctgtttttatctcaccttataattcacagaacgctgtagcttcaaaaatcttaggattgcctacgcagactgttgattcatcacagggttctgaatatgactatgtcatattcacacaaactactgaaacagcacactcttgtaatgtcaaccgcttcaatgtggctatcacaagggcaaaaattggcattttgtgcataatgtctgatagagatctttatgacaaactgcaatttacaagtctagaaataccacgtcgcaatgtggctacattacaagcagaaaatgtaactggactttttaaggactgtagtaagatcattactggtcttcatcctacacaggcacctacacacctcagcgttgatataaagttcaagactgaaggattatgtgttgacataccaggcataccaaaggacatgacctaccgtagactcatctctatgatgggtttcaaaatgaattaccaagtcaatggttaccctaatatgtttatcacccgcgaagaagctattcgtcacgttcgtgcgtggattggctttgatgtagagggctgtcatgcaactagagatgctgtgggtactaacctacctctccagctaggattttctacaggtgttaacttagtagctgtaccgactggttatgttgacactgaaaataacacagaattcaccagagttaatgcaaaacctccaccaggtgaccagtttaaacatcttataccactcatgtataaaggcttgccctggaatgtagtgcgtattaagatagtacaaatgctcagtgatacactgaaaggattgtcagacagagtcgtgttcgtcctttgggcgcatggctttgagcttacatcaatgaagtactttgtcaagattggacctgaaagaacgtgttgtctgtgtgacaaacgtgcaacttgcttttctacttcatcagatacttatgcctgctggaatcattctgtgggttttgactatgtctataacccatttatgattgatgttcagcagtggggctttacgggtaaccttcagagtaaccatgaccaacattgccaggtacatggaaatgcacatgtggctagttgtgatgctatcatgactagatgtttagcagtccatgagtgctttgttaagcgcgttgattggtctgttgaataccctattataggagatgaactgagggttaattctgcttgcagaaaagtacaacacatggttgtgaagtctgcattgcttgctgataagtttccagttcttcatgacattggaaatccaaaggctatcaagtgtgtgcctcaggctgaagtagaatggaagttctacgatgctcagccatgtagtgacaaagcttacaaaatagaggaactcttctattcttatgctacacatcacgataaattcactgatggtgtttgtttgttttggaattgtaacgttgatcgttacccagccaatgcaattgtgtgtaggtttgacacaagagtcttgtcaaacttgaacttaccaggctgtgatggtggtagtttgtatgtgaataagcatgcattccacactccagctttcgataaaagtgcatttactaatttaaagcaattgcctttcttttactattctgatagtccttgtgagtctcatggcaaacaagtagtgtcggatattgattatgttccactcaaatctgctacgtgtattacacgatgcaatttaggtggtgctgtttgcagacaccatgcaaatgagtaccgacagtacttggatgcatataatatgatgatttctgctggatttagcctatggatttacaaacaatttgatacttataacctgtggaatacatttaccaggttacagagtttagaaaatgtggcttataatgttgttaataaaggacactttgatggacacgccggcgaagcacctgtttccatcattaataatgctgtttacacaaaggtagatggtattgatgtggagatctttgaaaataagacaacacttcctgttaatgttgcatttgagctttgggctaagcgtaacattaaaccagtgccagagattaagatactcaataatttgggtgttgatatcgctgctaatactgtaatctgggactacaaaagagaagccccagcacatgtgtctacaataggtgtctgcacaatgactgacattgccaagaaacctactgagagtgcttgttcttcacttactgtcttgtttgatggtagagtggaaggacaggtagacctttttagaaacgcccgtaatggtgttttaataacagaaggttcagtcaaaggtctaacaccttcaaagggaccagcacaagctagcgtcaatggagtcacattaattggagaatcagtaaaaacacagtttaactactttaagaaagtagacggcattattcaacagttgcctgaaacctactttactcagagcagagacttagaggattttaagcccagatcacaaatggaaactgactttctcgagctcgctatggatgaattcatacagcgatataagctcgagggctatgccttcgaacacatcgtttatggagatttcagtcatggacaacttggcggtcttcatttaatgataggcttagccaagcgctcacaagattcaccacttaaattagaggattttatccctatggacagcacagtgaaaaattacttcataacagatgcgcaaacaggttcatcaaaatgtgtgtgttctgtgattgatcttttacttgatgactttgtcgagataataaagtcacaagatttgtcagtgatttcaaaagtggtcaaggttacaattgactatgctgaaatttcattcatgctttggtgtaaggatggacatgttgaaaccttctacccaaaactacaagcaagtcaagcgtggcaaccaggtgttgcgatgcctaacttgtacaagatgcaaagaatgcttcttgaaaagtgtgaccttcagaattatggtgaaaatgctgttataccaaaaggaataatgatgaatgtcgcaaagtatactcaactgtgtcaatacttaaatacacttactttagctgtaccctacaacatgagagttattcactttggtgctggctctgataaaggagttgcaccaggtacagctgtgctcagaccatggttgccaactggcacactacttgtcgattcagatcttaatgacttcgtctccgacgcagattctactttaattggagactgtgcaacagtacatacggctaataaatgggaccttattattagcgatatgtatgaccctaggaccaaacatgtgacaaaagagaatgactctaaagaagggtttttcacttatctgtgtggatttataaagcaaaaactagccctgggtggttctatagctgtaaagataacagagcattcttggaatgctgacctttacaagcttatgggccatttctcatggtggacagcttttgttacaaatgtaaatgcatcatcatcggaagcatttttaattggggctaactatcttggcaagccgaaggaccaaattgatggctataccatgcatgctaactacattttctggaggaacacaaatcctatccagttgtcttcctattcactctttgacatgagccaatttcctcttaaattaagaggaactgctgtaatgtctcttaaggagaatcaaatcaatgatatgatttattctcttctggaaaaaggtaggcttatcattagagaaaacaacagagttgtggtttcaagtgatattcttgttaacaactaaacgaacatgtttattttcttattatttcttactctcactagtggtagtgaccttgaccggtgcaccacttttgatgatgttcaagctcctaattacactcaacatacttcatctatgaggggggtttactatcctgatgaaatttttagatcagacactctttatttaactcaggatttatttcttcccttttattctaatgttacagggtttcatactattaatcatacgtttggcaaccctgtcataccttttaaggatggtatttattttgctgccacagagaaatcaaatgttgtccgtggttgggtttttggttctaccatgaacaacaagtcacagtcggtgattattattaacaattctactaatgttgttatacgagcatgtaactttgaattgtgtgacaaccctttctttgctgtttctaaacccatgggtacacagacacatactatgatattcgataatgcatttaattgcactttcgagtacatatctgatgccttttcgcttgatgtttcagaaaagtcaggtaattttaaacacttacgagagtttgtgtttaaaaataaagatgggtttctctatgtttataagggctatcaacctatagatgtagttcgtgatctaccttctggttttaacactttgaaacctatttttaagttgcctcttggtattaacattacaaattttagagccattcttacagccttttcacctgctcaagacacttggggcacgtcagctgcagcctattttgttggctatttaaagccaactacatttatgctcaagtatgatgaaaatggtacaatcacagatgctgttgattgttctcaaaatccacttgctgaactcaaatgctctgttaagagctttgagattgacaaaggaatttaccagacctctaatttcagggttgttccctcaggagatgttgtgagattccctaatattacaaacttgtgtccttttggagaggtttttaatgctactaaattcccttctgtctatgcatgggagagaaaaaaaatttctaattgtgttgctgattactctgtgctctacaactcaacatttttttcaacctttaagtgctatggcgtttctgccactaagttgaatgatctttgcttctccaatgtctatgcagattcttttgtagtcaagggagatgatgtaagacaaatagcgccaggacaaactggtgttattgctgattataattataaattgccagatgatttcatgggttgtgtccttgcttggaatactaggaacattgatgctacttcaactggtaattataattataaatataggtatcttagacatggcaagcttaggccctttgagagagacatatctaatgtgcctttctcccctgatggcaaaccttgcaccccacctgctcttaattgttattggccattaaatgattatggtttttacaccactactggcattggctaccaaccttacagagttgtagtactttcttttgaacttttaaatgcaccggccacggtttgtggaccaaaattatccactgaccttattaagaaccagtgtgtcaattttaattttaatggactcactggtactggtgtgttaactccttcttcaaagagatttcaaccatttcaacaatttggccgtgatgtttctgatttcactgattccgttcgagatcctaaaacatctgaaatattagacatttcaccttgctcttttgggggtgtaagtgtaattacacctggaacaaatgcttcatctgaagttgctgttctatatcaagatgttaactgcactgatgtttctacagcaattcatgcagatcaactcacaccagcttggcgcatatattctactggaaacaatgtattccagactcaagcaggctgtcttataggagctgagcatgtcgacacttcttatgagtgcgacattcctattggagctggcatttgtgctagttaccatacagtttctttattacgtagtactagccaaaaatctattgtggcttatactatgtctttaggtgctgatagttcaattgcttactctaataacaccattgctatacctactaacttttcaattagcattactacagaagtaatgcctgtttctatggctaaaacctccgtagattgtaatatgtacatctgcggagattctactgaatgtgctaatttgcttctccaatatggtagcttttgcacacaactaaatcgtgcactctcaggtattgctgctgaacaggatcgcaacacacgtgaagtgttcgctcaagtcaaacaaatgtacaaaaccccaactttgaaatattttggtggttttaatttttcacaaatattacctgaccctctaaagccaactaagaggtcttttattgaggacttgctctttaataaggtgacactcgctgatgctggcttcatgaagcaatatggcgaatgcctaggtgatattaatgctagagatctcatttgtgcgcagaagttcaatggacttacagtgttgccacctctgctcactgatgatatgattgctgcctacactgctgctctagttagtggtactgccactgctggatggacatttggtgctggcgctgctcttcaaataccttttgctatgcaaatggcatataggttcaatggcattggagttacccaaaatgttctctatgagaaccaaaaacaaatcgccaaccaatttaacaaggcgattagtcaaattcaagaatcacttacaacaacatcaactgcattgggcaagctgcaagacgttgttaaccagaatgctcaagcattaaacacacttgttaaacaacttagctctaattttggtgcaatttcaagtgtgctaaatgatatcctttcgcgacttgataaagtcgaggcggaggtacaaattgacaggttaattacaggcagacttcaaagccttcaaacctatgtaacacaacaactaatcagggctgctgaaatcatggcttctgctaatcttgctgctactaaaatgtctgagtgtgttcttggacaatcaaaaagagttgacttttgtggaaagggctaccaccttatgtccttcccacaagcagccccgcatggtgttgtcttcctacatgtcacgtatgtgccatcccaggagaggaacttcaccacagcgccagcaatttgtcatgaaggcaaagcatacttccctcgtgaaggtgtttttgtgtttaatggcacttcttggtttattacacagaggaacttcttttctccacaaataattactacagacaatacatttgtctcaggaaattgtgatgtcgttattggcatcattaacaacacagtttatgatcctctgcaacctgagcttgactcattcaaagaagagctggacaagtacttcaaaaatcatacatcaccagatgttgatcttggcgacatttcaggcattaacgcttctgtcgtcaacattcaaaaagaaattgaccgcctcaatgaggtcgctaaaaatttaaatgaatcactcattgaccttcaagaattgggaaaatatgagcaatatattaaatggccttggtatgtttggctcggcttcattgctggactaattgccatcgtcatggttacaatcttgctttgttgcatgactagttgttgcagttgcctcaagggtgcatgctcttgtggttcttgctgcaagtttgatgaggatgactctgagccagttctcaagggtgtcaaattacattacacataaacgaacttatggatttgtttatgagattttttactcttggatcaattactgcacagccagtaaaaattgacaatgcttctcctgcaagtactgttcatgctacagcaacgataccgctacaagcctcactccctttcggatggcttgttattggcgttgcatttcttgctgtttttcagagcgctaccaaaataattgcgctcaataaaagatggcagctagccctttataagggcttccagttcatttgcaatttactgctgctatttgttaccatctattcacatcttttgcttgtcgctgcaggtatggaggcgcaatttttgtacctctatgccttgatatattttctacaatgcatcaacgcatgtagaattattatgagatgttggctttgttggaagtgcaaatccaagaacccattactttatgatgccaactactttgtttgctggcacacacataactatgactactgtataccatataacagtgtcacagatacaattgtcgttactgaaggtgacggcatttcaacaccaaaactcaaagaagactaccaaattggtggttattctgaggataggcactcaggtgttaaagactatgtcgttgtacatggctatttcaccgaagtttactaccagcttgagtctacacaaattactacagacactggtattgaaaatgctacattcttcatctttaacaagcttgttaaagacccaccgaatgtgcaaatacacacaatcgacggctcttcaggagttgctaatccagcaatggatccaatttatgatgagccgacgacgactactagcgtgcctttgtaagcacaagaaagtgagtacgaacttatgtactcattcgtttcggaagaaacaggtacgttaatagttaatagcgtacttctttttcttgctttcgtggtattcttgctagtcacactagccatccttactgcgcttcgattgtgtgcgtactgctgcaatattgttaacgtgagtttagtaaaaccaacggtttacgtctactcgcgtgttaaaaatctgaactcttctgaaggagttcctgatcttctggtctaaacgaactaactattattattattctgtttggaactttaacattgcttatcatggcagacaacggtactattaccgttgaggagcttaaacaactcctggaacaatggaacctagtaataggtttcctattcctagcctggattatgttactacaatttgcctattctaatcggaacaggtttttgtacataataaagcttgttttcctctggctcttgtggccagtaacacttgcttgttttgtgcttgctgctgtctacagaattaattgggtgactggcgggattgcgattgcaatggcttgtattgtaggcttgatgtggcttagctacttcgttgcttccttcaggctgtttgctcgtacccgctcaatgtggtcattcaacccagaaacaaacattcttctcaatgtgcctctccgggggacaattgtgaccagaccgctcatggaaagtgaacttgtcattggtgctgtgatcattcgtggtcacttgcgaatggccggacactccctagggcgctgtgacattaaggacctgccaaaagagatcactgtggctacatcacgaacgctttcttattacaaattaggagcgtcgcagcgtgtaggcactgattcaggttttgctgcatacaaccgctaccgtattggaaactataaattaaatacagaccacgccggtagcaacgacaatattgctttgctagtacagtaagtgacaacagatgtttcatcttgttgacttccaggttacaatagcagagatattgattatcattatgaggactttcaggattgctatttggaatcttgacgttataataagttcaatagtgagacaattatttaagcctctaactaagaagaattattcggagttagatgatgaagaacttatggagttagattatccataaaacgaacatgaaaattattctcttcctgacattgattgtatttacatcttgcgagctatatcactatcaggagtgtgttagaggtacgactgtactactaaaagaaccttgcccatcaggaacatacgagggcaattcaccatttcaccctcttgctgacaataaatttgcactaacttgcactagcacacactttgcttttgcttgtgctgacggtactcgacatacctatcagctgcgtgcaagatcagtttcaccaaaacttttcatcagacaagaggaggttcaacaagagctctactcgccactttttctcattgttgctgctctagtatttttaatactttgcttcaccattaagagaaagacagaatgaatgagctcactttaattgacttctatttgtgctttttagcctttctgctattccttgttttaataatgcttattatattttggttttcactcgaaatccaggatctagaagaaccttgtaccaaagtctaaacgaacatgaaacttctcattgttttgacttgtatttctctatgcagttgcatacgcactgtagtacagcgctgtgcatctaataaacctcatgtgcttgaagatccttgtaaggtacaacactaggggtaatacttatagcactgcttggctttgtgctctaggaaaggttttaccttttcatagatggcacactatggttcaaacatgcacacctaatgttactatcaactgtcaagatccagctggtggtgcgcttatagctaggtgttggtaccttcatgaaggtcaccaaactgctgcatttagagacgtacttgttgttttaaataaacgaacaaattaaaatgtctgataatggaccccaatcaaaccaacgtagtgccccccgcattacatttggtggacccacagattcaactgacaataaccagaatggaggacgcaatggggcaaggccaaaacagcgccgaccccaaggtttacccaataatactgcgtcttggttcacagctctcactcagcatggcaaggaggaacttagattccctcgaggccagggcgttccaatcaacaccaatagtggtccagatgaccaaattggctactaccgaagagctacccgacgagttcgtggtggtgacggcaaaatgaaagagctcagccccagatggtacttctattacctaggaactggcccagaagcttcacttccctacggcgctaacaaagaaggcatcgtatgggttgcaactgagggagccttgaatacacccaaagaccacattggcacccgcaatcctaataacaatgctgccaccgtgctacaacttcctcaaggaacaacattgccaaaaggcttctacgcagagggaagcagaggcggcagtcaagcctcttctcgctcctcatcacgtagtcgcggtaattcaagaaattcaactcctggcagcagtaggggaaattctcctgctcgaatggctagcggaggtggtgaaactgccctcgcgctattgctgctagacagattgaaccagcttgagagcaaagtttctggtaaaggccaacaacaacaaggccaaactgtcactaagaaatctgctgctgaggcatctaaaaagcctcgccaaaaacgtactgccacaaaacagtacaacgtcactcaagcatttgggagacgtggtccagaacaaacccaaggaaatttcggggaccaagacctaatcagacaaggaactgattacaaacattggccgcaaattgcacaatttgctccaagtgcctctgcattctttggaatgtcacgcattggcatggaagtcacaccttcgggaacatggctgacttatcatggagccattaaattggatgacaaagatccacaattcaaagacaacgtcatactgctgaacaagcacattgacgcatacaaaacattcccaccaacagagcctaaaaaggacaaaaagaaaaagactgatgaagctcagcctttgccgcagagacaaaagaagcagcccactgtgactcttcttcctgcggctgacatggatgatttctccagacaacttcaaaattccatgagtggagcttctgctgattcaactcaggcataaacactcatgatgaccacacaaggcagatgggctatgtaaacgttttcgcaattccgtttacgatacatagtctactcttgtgcagaatgaattctcgtaactaaacagcacaagtaggtttagttaactttaatctcacatagcaatctttaatcaatgtgtaacattagggaggacttgaaagagccaccacattttcatcgaggccacgcggagtacgatcgagggtacagtgaataatgctagggagagctgcctatatggaagagccctaatgtgtaaaattaattttagtagtgctatccccatgtgattttaatagcttcttaggagaatgacaaaaaaaaaaaaaaaaaaaaa

SEQ ID NO: 53 - DNA, 24774 bp, Coronavirus
  misc_feature 860-959, 2089-2188, 2478-2577, 2877-2976, 3576-3675, 3865-3964,4134-4233, 4563-4662, 5012-5111, 5781-5879, 7438-7537, 7837-7936,8616-8715, 12025-12124, 13984-14083, 16463-16562, 16932-17031,17381-17480, 18090-18189, 19019-19118, 19478-19577, 20357-20456,21086-21185, 21945-22044, 23174-23273, 23531: n = A,T,C or G
actttaaaatctgtgtagctgtcgctcggctgcatgcctagtgcacctacgcagtataaacaataataaattttactgtcgttgacaagaaacgagtaactcgtccctcttctgcagactgcttacggtttcgtccgtgttgcagtcgatcatcagcatacctaggtttcgtccgggtgtgaccgaaaggtaagatggagagccttgttcttggtgtcaacgagaaaacacacgtccaactcagtttgcctgtccttcaggttagagacgtgctagtgcgtggcttcggggactctgtggaagaggccctatcggaggcacgtgaacacctcaaaaatggcacttgtggtctagtagagctggaaaaaggcgtactgccccagcttgaacagccctatgtgttcattaaacgttctgatgccttaagcaccaatcacggccacaaggtcgttgagctggttgcagaaatggacggcattcagtacggtcgtagcggtataacactgggagtactcgtgccacatgtgggcgaaaccccaattgcataccgcaatgttcttcttcgtaagaacggtaataagggagccggtggtcatagctatggcatcgatctaaagtcttatgacttaggtgacgagcttggcactgatcccattgaagattatgaacaaaactggaacactaagcatggcagtggtgcactccgtgaactcactcgtgagctcaatggaggtgcagtcactcgctatgtcgacaacaatttctgtggcccagatgggtaccctcttgattgcatcaaagattttctcgcacgcgcgggcaagtcaatgtgcactctttccgaacaacttgattacatnnnnnnnnnnnnnnnnnnnnnnnnnnnnnnnnnnnnnnnnnnnnnnnnnnnnnnnnnnnnnnnnnnnnnnnnnnnnnnnnnnnnnnnnnnnnnnnnnnnntagttattgaaggacctactacatgtgggtacctacctactaatgctgtagtgaaaatgccatgtcctgcctgtcaagacccagagattggacctgagcatagtgttgcagattatcacaaccactcaaacattgaaactcgactccgcaagggaggtaggactagatgttttggaggctgtgtgtttgcctatgttggctgctataataagcgtgcctactgggttcctcgtgctagtgctgatattggctcaggccatactggcattactggtgacaatgtggagaccttgaatgaggatctccttgagatactgagtcgtgaacgtgttaacattaacattgttggcgattttcatttgaatgaagaggttgccatcattttggcatctttctctgcttctacaagtgcctttattgacactataaagagtcttgattacaagtctttcaaaaccattgttgagtcctgcggtaactataaagttaccaagggaaagcccgtaaaaggtgcttggaacattggacaacagagatcagttttaacaccactgtgtggttttccctcacaggctgctggtgttatcagatcaatttttgcgcgcacacttgatgcagcaaaccactcaattcctgatttgcaaagagcagctgtcaccatacttgatggtatttctgaacagtcattacgtcttgtcgacgccatggtttatacttcagacctgctcaccaacagtgtcattattatggcatatgtaactggtggtcttgtacaacagacttctcagtggttgtctaatcttttgggcactactgttgaaaaactcaggcctatctttgaatggattgaggcgaaacttagtgcaggagttgaatttctcaaggatgcttgggagattctcaaatttctcattacaggtgtttttgacatcgtcaagggtcaaatacaggttgcttcagataacatcaaggattgtgtaaaatgcttcattgatgttgttaacaaggcactcgaaatgtgcattgatcaagtcactatcgctggcgcaaagttgcgatcactcaacttaggtgaagtcttcatcgctcaaagcaagggactttaccgtcagtgtatacgtggcaaggannnnnnnnnnnnnnnnnnnnnnnnnnnnnnnnnnnnnnnnnnnnnnnnnnnnnnnnnnnnnnnnnnnnnnnnnnnnnnnnnnnnnnnnnnnnnnnnnnnngactttacaaccagtttctgatctccttaccaacatgggtattgatcttgatgagtggagtgtagctacattctacttatttgatgatgctggtgaagaaaacttttcatcacgtatgtattgttccttttaccctccagatgaggaagaagaggacgatgcagagtgtgaggaagaagaaattgatgaaacctgtgaacatgagtacggtacagaggatgattatcaaggtctccctctggaatttggtgcctcagctgaaacagttcgagttgaggaagaagaagagnnnnnnnnnnnnnnnnnnnnnnnnnnnnnnnnnnnnnnnnnnnnnnnnnnnnnnnnnnnnnnnnnnnnnnnnnnnnnnnnnnnnnnnnnnnnnnnnnnnnggtggtggtgtagcaggtgcactcaacaaggcaaccaatggtgccatgcaaaaggagagtgatgattacattaagctaaatggccctcttacagtaggagggtcttgtttgctttctggacataatcttgctaagaagtgtctgcatgttgttggacctaacctaaatgcaggtgaggacatccagcttcttaaggcagcatatgaaaatttcaattcacaggacatcttacttgcaccattgttgtcagcaggcatatttggtgctaaaccacttcagtctttacaagtgtgcgtgcannnnnnnnnnnnnnnnnnnnnnnnnnnnnnnnnnnnnnnnnnnnnnnnnnnnnnnnnnnnnnnnnnnnnnnnnnnnnnnnnnnnnnnnnnnnnnnnnnnntaaacaagaggagccaccaaacacagaagattccaaaactgaggagaaatctgtcgtacagaagcctgtcgatgtgaagccaaaaattaaggcctgcattgatgaggttaccacaacactggaagaaactaagtttcttaccaataagttactcttgtttgctgatatcaatggtaagctttaccatgattctcagaacatgcttagaggtgaagatatgtctttccttgagaaggatgcaccttacatggtaggtgatgttatcactagtggtgatatcacttgtgttgtaataccctccaaaaaggctggtggcactactgagatgctctcaagagctttgaagaaagtgccagttgatgagtatataaccacgtaccctggacaaggatgtgctggttatacacttgaggaagctaagactgctcttaagaaatgcaaatctgcattttatgtactaccttcagaagcacctaatgctaaggaagagattctaggaactgtatcctggaatttgagagaaatgcttgctcatgctgaagagacaagaaaattaatgcctatatgcatggatgttagagccataatggcaaccatccnnnnnnnnnnnnnnnnnnnnnnnnnnnnnnnnnnnnnnnnnnnnnnnnnnnnnnnnnnnnnnnnnnnnnnnnnnnnnnnnnnnnnnnnnnnnnnnnnnnncgtagtgtcagtatcatcaccagatgctgttactacatataatggatacctcacttcgtcatcaaagacatctgaggagcactttgtagaaacagtttctttggctggctcttacagagattggtcctattcaggacagcgtacagagttaggtgttgaatttcttaagcgtggtgacaaaattgtgtannnnnnnnnnnnnnnnnnnnnnnnnnnnnnnnnnnnnnnnnnnnnnnnnnnnnnnnnnnnnnnnnnnnnnnnnnnnnnnnnnnnnnnnnnnnnnnnnnnntggatggtgctgatgttacaaaaattaaacctcatgtaaatcatgagggtaagactttctttgtactacctagtgatgacacactacgtagtgaagctttcgagtactaccatactcttgatgagagttttcttggtaggtacatgtctgctttaaaccacacaaagaannnnnnnnnnnnnnnnnnnnnnnnnnnnnnnnnnnnnnnnnnnnnnnnnnnnnnnnnnnnnnnnnnnnnnnnnnnnnnnnnnnnnnnnnnnnnnnnnnnncgtgctggtgatgctgctaacttttgtgcactcatactcgcttacagtaataaaactgttggcgagcttggtgatgtcagagaaactatgacccatcttctacagcatgctaatttggaatctgcaaagcgagttcttaatgtggtgtgtaaacattgtggtcagaaaactactaccttaacgggtgtagaagctgtgatgtatatgggtactctatcttatgataatcttaagacaggtgtttccattccatgtgtgtgtggtcgtgatgctacacaatatctagtacaacaagagtcttcttttgttatgatgtctgcaccacctgcnnnnnnnnnnnnnnnnnnnnnnnnnnnnnnnnnnnnnnnnnnnnnnnnnnnnnnnnnnnnnnnnnnnnnnnnnnnnnnnnnnnnnnnnnnnnnnnnnnnncacattaaccaggctacaaccaagacaacgttcaaaccaaacacttggtgtttacgttgtctttggagtacaaagccagtagatacttcaaattcatttgaagttctggcagtagaagacacacaaggaatggacaatcttgcttgtgaaagtcaacaacccacctctgaagaagtagtggaaaatcctaccatacagaaggaagtcatagagtgtgacgtgaaaactaccgaagttgtaggcaatgtcatacttaaaccatcagatgaaggtgttaaagtaacacaagagttaggtcatgaggatcttatggctgcttatgtggaaaacacaagcattaccattaagannnnnnnnnnnnnnnnnnnnnnnnnnnnnnnnnnnnnnnnnnnnnnnnnnnnnnnnnnnnnnnnnnnnnnnnnnnnnnnnnnnnnnnnnnnnnnnnnnnnaattaatagtgttccttggagtaaaattttggcttatgtcaaaccattcttaggacaagcagcaattacaacatcaaattgcgctaagagattagcacaacgtgtgtttaacaattatatgccttatgtgtttacattattgttccaattgtgtacttttactaaaagtaccaattctagaattagagcttcactacctacaactattgctaaaaatagtgttaagagtgttgctaaattatgtttggatgccggcattaattatgtgaagtcacccaaattttctaaattgttcacaatcgctatgtggctattgttgttaagtatttgcttaggttctctaatctgtgtaactgctgcttttggtgtactcttatctaattttggtgctccttcttattgtaatggcgttagagaattgtatcttaattcgtctaacgttactactatggatttctgtgaaggttcttttccttgcagcatttgtttaagtggattagactcccttgattcttatccagctcttgaaaccattcaggtgacgatttcatcgtacaagctagacttgacaattttaggtctggccgctgagtgggttttggcatatatgttgttcacaaaattcttttatttattaggtctttcagctataatgcaggtgttctttggnnnnnnnnnnnnnnnnnnnnnnnnnnnnnnnnnnnnnnnnnnnnnnnnnnnnnnnnnnnnnnnnnnnnnnnnnnnnnnnnnnnnnnnnnnnnnnnnnnnncaaatggcacccgtttctgcaatggttaggatgtacatcttctttgcttctttctactacatatggaagagctatgttcatatcatggatggttgcacctcttcgacttgcatgatgtgctataagcgcaatcgtgccacacgcgttgagtgtacaactattgttaatggcatgaagagatctttctatgtctatgcaaatggaggccgtggcttctgcaagactcacaattggaattgtctcaattgtgacacattttgcactggtagtacattcattagtgatgaagttgctcgtgatttgtcactccagtttaaaagaccaatcaaccctactgaccagtcatcgtatattgttgatagtgttgctgtgaaaaatggcgcgcttcacctctactttgacaaggctggtcaaaagacctatgagagacatccgctctcccattttgtcaatttagacaatttgagagctaacaacactaaaggttcactgcctattaatgtcatagtttttgatggcaagtccaaatgcgacgagtctgcttctaagtctgcttctgtgtactacagtcagctgatgtgccaacctattctgttgcttgaccaagctcttgtatcagacgttggagatagtactgaagtttccgttaagatgtttgatgcttatgtcgacaccttttcagcaacttttagtgttcctatggaaaaacttaaggcacttgttgctacagctcacagcgagttagcaaagggtgtagctttagatggtgtcctttctacattcgtgtcagctgcccgacaaggtgttgttgataccgatgttgacacaaaggatgttattgaatgtctcaaactttcacatcactctgacttagaagtgacaggtgacagttgtaacaatttcatgctcacctataataaggttgaaaacatgacgcccagagatcttggcgcatgtattgactgtaatgcaaggcatatcaatgcccaagtagcaaaaagtcacaatgtttcactcatctggaatgtaaaagactacatgtctttatctgaacagctgcgtaaacaaattcgtagtgctgccaagaagaacaacataccttttagactaacttgtgctacaactagacaggttgtcaatgtcataactactaaaatctcactcaagggtggtaagattgttagtacttgttttaaacttatgcttaaggccacattattgtgcgttcttgctgcattggtttgttaaatcgttatgccagtacatacattgtcaatccatgatggttacacaaatgaaatcattggttacaaagccattcaggatggtgtcactcgtgacatcatttctactgatgattgttttgcaaataaacatgctggttttgacgcatggtttagccagcgtggtggttcatacaaaaatgacaaaagctgccctgtagtagctgctatcattacaagagagattggtttcatagtgcctggcttaccgggtactgtgctgagagcaatcaatggtgacttcttgcattttctacctcgtgtttttagtgctgtnnnnnnnnnnnnnnnnnnnnnnnnnnnnnnnnnnnnnnnnnnnnnnnnnnnnnnnnnnnnnnnnnnnnnnnnnnnnnnnnnnnnnnnnnnnnnnnnnnnntgggcaaacctgtgccatattgttatgacactaatttgctagagggttctatttcttatagtgagcttcgtccagacactcgttatgtgcttatggatggttccatcatacagtttcctaacacttacctggagggttctgttagagtagtaacaacttttgatgctgagtactgtagacatggtacatgcgaaaggtcagaagtaggtatttgcctatctaccagtggtagatgggttcttaataatgagcattacagagctctatcaggagttttctgtggtgttgatgcgatgaatnnnnnnnnnnnnnnnnnnnnnnnnnnnnnnnnnnnnnnnnnnnnnnnnnnnnnnnnnnnnnnnnnnnnnnnnnnnnnnnnnnnnnnnnnnnnnnnnnnnntcttgacatcactattgattcttgttcaaagtacacagtggtcactgtttttctttgtttacgagaatgctttcttgccatttactcttggtattatggcaattgctgcatgtgctatgctgcttgttaagcataagcacgcattcttgtgcttgtttctgttaccttctcttgcaacagttgcttactttaatatggtctacatgcctgctagctgggtgatgcgtatcatgacatggcttgaattggctgacactagcttgtctggttataggcttaaggattgtgttatgtatgcttcagctttagttttgcttattctcatgacagctcgcactgtttatgatgatgctgctagacgtgtttggacactgatgaatgtcattacacttgtttacaaagtctactatggtaatgctttagatcaagctatttccatgtgggccttagttatttctgtaacctctaactattctggtgtcgttacgactatcatgtttttagctagagctatagtgtttgtgtgtgttgagtattacccattgttatttattactggcaacaccttacagtgtatcatgcttgtttattgtttcttaggctattgttgctgctgctactttggccttttctgtttactcaaccgttacttcaggcttactcttggtgtttatgactannnnnnnnnnnnnnnnnnnnnnnnnnnnnnnnnnnnnnnnnnnnnnnnnnnnnnnnnnnnnnnnnnnnnnnnnnnnnnnnnnnnnnnnnnnnnnnnnnnncatgcagggtgctgtagacattaataggttgtgcgaggaaatgctcgataaccgtgctactcttcaggctattgcttcagaatttagttctttaccatcatatgccgcttatgccactgcccaggaggcctatgagcaggctgtagctaatggtgattctgaagtcgttctcaaaaagttaaagaaatctttgaatgtggctaaatctgagtttgaccgtgatgctgccatgcaacgcaagttggaaaagatggcagatcaggctatgacccaaatgtacaaacaggcaagatctgaggacaagagggcaaaagtaactagtgctatgcaaacaatgctcttcactatgcttaggaagcttgataatgatgcacttaacaacattatcaacaatgcgcgtgatggttgtgttccactcaacatcataccattgactacagcagccaaactcatggttgttgtccctgattatggtacctacaagaacacttgtgatggtaacacctttacatatgcatctgcactctgggaaatccagcaagttgttgatgcggatagcaagattgttcaacttagtgaaattaacatggacaattcaccaaatttggcttggcctcttattgttacagctctaagagccaactcagctgttaaactacagaataatgaactgagtccagtagcactacgacagatgtcctgtgcggctggtaccacacaaacagcttgtactgatgacaatgcacttgcctactataacaattcgaagggaggtaggtttgtgctggcattactatcagaccaccaagatctcaaatgggctagattccctaagagtgatggtacaggtacaatttacacagaactggaaccaccttgtaggtttgttacagacacaccaaaagggcctaaagtgaaatacttgtacttcatcaaaggcttaaacaacctaaatagaggtatggtgctgggcagtttagctgctacagtacgtcttcaggctggaaatgctacagaagtacctgccaattcaactgtgctttccttctgtgcttttgcagtagaccctgctaaagcatataaggattacctagcaagtggaggacaaccaatcaccaactgtgtgaagatgttgtgtacacacactggtacaggacaggcaattactgtaacaccagaagctaacatggaccaagagtcctttggtggtgcttcatgttgtctgtattgtagatgccacattgaccatccaaatcctaaaggattctgtgacttgaaaggtaagtacgtccaaatacctaccacttgtgctaatgacccagtgggttttacacttagaaacacagtctgtaccgtctgcggaatgtggaaaggttatggctgtagttgtgaccaactccgcgaacccttgatgcagtctgcggatgcatcaacgtttttaaacgggtttgcggtgtaagtgcagcccgtcttacaccgtgcggcacaggcactagtactgatgtcgtctacagggcttttgatatttacaacgaaaaagttgctggttttgcaaagttcctaaaaactaattgctgtcgcttccaggagaaggatgaggaaggcaatttattagactcttactttgtagttaagaggcatactatgtctaactaccaacatgaagagactatttataacttggttaaagattgtccagcggttgctgtccatgactttttcaagtttagagtagatggtgacatggtaccacatatatcacgtcagcgtctaactaaatacacaatggctgatttagtctatgctctacgtcattttgatgagggtaattgtgatacattaaaagaaatactcgtcacatacaattgctgtgatgatgattatttcaataagaaggattggtatgacttcgtagagaatcctgacatcttacgcgtatatgctaacttaggtgagcgtgtacgccaatcattattaaagactgtacaattctgcgatgctatgcgtgatgcaggcattgtaggcgtactgacattagataatcaggatcttaatgggaactggtacgatttcggtgatttcgtacaagtagcaccaggctgcggagttcctattgtggattcatattactcattgctgatgcccatcctcactttgactagggcattggctgctgagtcccatatggatgctgatctcgcaaaaccacttattaagtgggatttgctgaaatatgattttacggaagagagactttgtctcttcgaccgttattttaaatattgggaccagacataccatcccaattgtattaactgtttggatgataggtgtatccttcattgtgcaaactttaatgtgttattttctactgtgtttccacctacaagttttggaccactagtaagaaaaatatttgtagatggtgttccttttgttgtttcaactggataccattttcgtgagttaggagtcgtacataatcaggatgtaaacttacatagctcgcgtctcagtttcaaggaacttttagtgtatgctgctgatccagctatgcatgcagcttctggcaatttattgctagataaacgcactacatgcttttcagtagctgcactaacaaacaatgttgcttttcaaactgtcaaacccggtaattttaataaagacttttatgactttgctgtgtctaaaggtttctttaaggaaggaagttctgttgaactaaaacacttcttctttgctcaggatggcaacgctgctatcagtgattatgactattatcgttataatctgccaacaatgtgtgatatcagacaactcctattcgtagttgaagttgttgataaatactttgattgttacgatggtggctgtattaatgccaaccaagtaatcgttaacaatctggataaatcagctggtttcccatttaataaatggggtaaggctagactttattatgactcaatgagttatgaggatcaagatgcacttttcgcgtatactaagcgtaatgtcatccctactataactcaaatgaatcttaagtatgccattagtgcaaagaatagagctcgcaccgtagctggtgtctctatctgtagtactatgacaaatagacagtttcatcagaaattattgaagtcaatagccgccactagaggagctactgtggtaattggaacaagcaagttttacggtggctggcataatatgttaaaaactgtttacagtgatgtagaaactccacaccttatgggttgggattatccaaaatgtgacagagccatgcctaacatgcttaggnnnnnnnnnnnnnnnnnnnnnnnnnnnnnnnnnnnnnnnnnnnnnnnnnnnnnnnnnnnnnnnnnnnnnnnnnnnnnnnnnnnnnnnnnnnnnnnnnnnnattacgtgtacctgccttacccagatccatcaagaatattaggcgcaggctgttttgtcgatgatattgtcaaaacagatggtacacttatgattgaaaggttcgtgtcactggctattgatgcttacccacttacaaaacatcctaatcaggagtatgctgatgtctttcacttgtatttacaatacattagaaagttacatgatgagcttactggccacatgttggacatgtattccgtaatgctaactaatgataacacctcacggtactgggaacctgagttttatgaggctatgtacacaccacatacagtcttgcaggctgtaggtgcttgtgtattgtgcaattcacagacttcacttcgttgcggtgcctgtattaggagaccattcctatgttgcaagtgctgctatgaccatgtcatttcaacatcacacaaattagtgttgtctgttaatccctatgtttgcaatgccccaggttgtgatgtcactgatgtgacacaactgtatctaggaggtatgagctattattgcaagtcacataagcctcccattagttttccattatgtgctaatggtcaggtttttggtttatacaaaaacacatgtgtaggcagtgacaatgtcactgacttcaatgcgatagcaacatgtgattggactaatgctggcgattacatacttgccaacacttgtactgagagactcaagcttttcgcagcagaaacgctcaaagccactgaggaaacatttaagctgtcatatggtattgccactgtacgcgaagtactctctgacagagaattgcatctttcatgggaggttggaaaacctagaccaccattgaacagaaactatgtctttactggttaccgtgtaactaaaaatagtaaagtacagattggagagtacacctttgaaaaaggtgactatggtgatgctgttgtgtacagaggtactacgacatacaagttgaatgttggtgattactttgtgttgacatctcacactgtaatgccacttagtgcacctactctagtgccacaagagcactatgtgagaattactggcttgtacccaacactcaacatctcagatgagttttctagcaatgttgcaaattatcaaaaggtcggcatgcaaaagtactctacactccaaggaccacctggtactggtaagagtcattttgccatcggacttgctctctattacccatctgctcgcatagtgtatacggcatgctctcatgcagctgttgatgccctatgtgaaaaggcattaaaatatttgcccatagataaatgtagtagaatcatacctgcgcgtgcgcgcgtagagtgttttgataaattcaaagtgaattcaacactagaacagtatgttttctgcactgtaaatgcattgccagaaacaactgctgacattgtagtctttgatgaaatctctatggctactaattatgacttgagtgttgtcaatgctagacttcgtgcaaaacactacgtctatattggcgatcctgctcaattaccagccccccgcacattgctgactaaaggcacactagaaccagaatattttaattcagtgtgcagacttatgaaaacaataggtccagacatgttccttggaacttgtcgccgttgtcctgctgaaattgttgacactgtgagtgctttagtttatgacaataagctaaaagcacacaaggagaagtcagctcaatgcttcaaaatgttctacaaaggtgttattacacatgatgtttcatctgcaatcaacagacctcaaataggcgttgtaagagaatttcttacacgcaatcctgcttggagaaaagctgtttttatcnnnnnnnnnnnnnnnnnnnnnnnnnnnnnnnnnnnnnnnnnnnnnnnnnnnnnnnnnnnnnnnnnnnnnnnnnnnnnnnnnnnnnnnnnnnnnnnnnnnnctctatgatgggtttcaaaatgaattaccaagtcaatggttaccctaatatgtttatcacccgcgaagaagctattcgtcacgttcgtgcgtggattggctttgatgtagagggctgtcatgcaactagagatgctgtgggtactaacctacctctccagctaggattttctacaggtgttaacttagtagctgtaccgactggttatgttgacactgaaaataacacagaattcaccagagttaatgcaaaacctccaccaggtgaccagtttaaacatcttataccactcatgtataaaggcttgccctggaatgtagtgcgtattaagatagtacaaatgctcagtgatacactgaaaggattgtcagacagagtcgtgttcgtcctttgggcgcatggctttgagcttacatcaatgaagtactttgtcaagattggacctgaaagaacgtgttgtctgtgtgacaaacgtgcaacttgcttttctacttcatcagatacttatgcctgctggaatcattctgtgggttttgactatgtctataacccatttatgattgatgttcagcagtggggctttacgggtaaccttcagagtaaccatgaccaacattgccaggtacatggaaatgcacatgtggctagttgtgatgctatcatgactagatgtttagcagtccatgagtgctttgttaagcgcgttgattggtctgttgaataccctattataggagatgaactgagggttaattctgcttgcagaaaagtacaacacatggttgtgaagtctgcattgcttgctgataagtttccagttcttcatgacattggaaatccaaaggctatcaagtgtgtgcctcaggctgaagtagaatggaagttctacgatgctcagccatgtagtgacaaagcttacaaaatagaggaactcttctattcttatgctacacatcacgataaattcactgatggtgtttgtttgttttggaattgtaacgttgatcgttacccagccaatgcaattgtgtgtaggtttgacacaagagtcttgtcaaacttgaacttaccaggctgtgatggtggtagtttgtatgtgaataagcatgcattccacactccagctttcgataaaagtgcatttactaatttaaagcaattgcctttcttttactattctgatagtccttgtgagtctcatggcaaacaagtagtgtcggatattgattatgttccactcaaatctgctacgtgtattacacgatgcaatttaggtggtgctgtttgcagacaccatgcaaatgagtaccgacagtacttggatgcatataatatgatgatttctgctggatttagcctatggatttacaaacaatttgatacttataacctgtggaatacatttaccaggttacagagtttagaaaatgtggcttataatgttgttaataaaggacactttgatggacacgccggcgaagcacctgtttccatcattaataatgctgtttacacaaaggtagatggtattgatgtggagatctttgaaaataagacaacacttcctgttaatgttgcatttgagctttgggctaagcgtaacattaaaccagtgccagagattaagatactcaataatttgggtgttgatatcgctgctaatactgtaatctgggactacaaaagagaagccccagcacatgtgtctacaataggtgtctgcacaatgactgacattgccaagaaacctactgagagtgcttgttcttcacttactgtcttgtttgatggtagagtggaaggacaggtagacctttttagaaacgcccgtaatggtgttttaataacagaaggttcagtcaaaggtctaacaccttcaaagggaccagcacaagctagcgtcaatggagtcacattaattggagaatcagtaaaaacacagtttaactactttaagaaagtagacggcattattcaacagttgcctgaaacctactttactcagagcagagacttagaggattttaagcccagatcacaaatggaaactgactttctcgagctcgctatggatgaattcatacagcgatataagctcgagggctatgccttcgaacacatcgtttatggagatttcagtcatggacaacttggcggtcttcatttaatgataggcttagccaagcgctcacaagattcaccacttaaattagaggattttatccctatggacagcacagtgaaaaattacttcataacagatgcgcaaacaggttcatcaaaatgtgtgtgttctgtgattgatcttttacttgatgactttgtcgagataataaagtcacaagatttgtcagtgatttcaaaagtggtcaaggttacnnnnnnnnnnnnnnnnnnnnnnnnnnnnnnnnnnnnnnnnnnnnnnnnnnnnnnnnnnnnnnnnnnnnnnnnnnnnnnnnnnnnnnnnnnnnnnnnnnnngcaacagtacatacggctaataaatgggaccttattattagcgatatgtatgaccctaggaccaaacatgtgacaaaagagaatgactctaaagaagggtttttcacttatctgtgtggatttataaagcaaaaactagccctgggtggttctatagctgtaaagataacagagcattcttggaatgctgacctttacaagcttatgggccatttctcatggtggacagcttttgttacaaatgtaaatgcatcatcatcggaagcatttttaattggggctaactatcttggcaagccgaaggaacaaattgatggctataccatgcatgctaactacattttctggaggaacacaaatcctatccagnnnnnnnnnnnnnnnnnnnnnnnnnnnnnnnnnnnnnnnnnnnnnnnnnnnnnnnnnnnnnnnnnnnnnnnnnnnnnnnnnnnnnnnnnnnnnnnnnnnntcaaatgttgtccgtggttgggtttttggttctaccatgaacaacaagtcacagtcggtgattattattaacaattctactaatgttgttatacgagcatgtaactttgaattgtgtgacaaccctttctttgctgtttctaaacccatgggtacacagacacatactatgatattcgataatgcatttaattgcactttcgagtacatatctgatgccttttcgcttgatgtttcagaaaagtcaggtaattttaaacacttacgagagtttgtgtttaaaaataaagatgggtttctctatgtttataagggctatcaacctatagatgtagttcgtgatctaccttnnnnnnnnnnnnnnnnnnnnnnnnnnnnnnnnnnnnnnnnnnnnnnnnnnnnnnnnnnnnnnnnnnnnnnnnnnnnnnnnnnnnnnnnnnnnnnnnnnnntagagccattcttacagccttttcacctgctcaagacacttggggcacgtcagctgcagcctattttgttggctatttaaagccaactacatttatgctcaagtatgatgaaaatggtacaatcacagatgctgttgattgttctcaaaatccacttgctgaactcaaatgctctgttaagagctttgagattgacaaaggaatttaccagacctctaatttcagggttgttccctcaggagatgttgtgagattccctaatattacaaacttgtgtccttttggagaggtttttaatgctactaaattcccttctgtctatgcatgggagagaaaaaaaatttctaattgtgttgctgattactctgtgctctacaactcaacatttttttcaacctttaagtgctatggcgtttctgccactaagttgaatgatctttgcttctccaatgtctatgcagattcttttgtagtcaagggagatgatgtaagacaaatagcgccaggacaaactggtgttattgctgattataattataaattgccagatgatttcatgggttgtgtccttgcttggaatactaggaacattgatgctacttcaactggnnnnnnnnnnnnnnnnnnnnnnnnnnnnnnnnnnnnnnnnnnnnnnnnnnnnnnnnnnnnnnnnnnnnnnnnnnnnnnnnnnnnnnnnnnnnnnnnnnnntcttaattgttattggccattaaatgattatggtttttacaccactactggcattggctaccaaccttacagagttgtagtactttcttttgaacttttaaatgcaccggccacggtttgtggaccaaaattatccactgaccttattaagaaccagtgtgtcaattttaattttaatggactcactggtactggtgtgttaactccttcttcaaagagatttcaaccatttcaacaatttggccgtgatgtttctgatttcactgattccgttcgagatcctaaaacatctgaaatattagacatttcaccttgctcttttgggggtgtaagtgtaattacacctggaacaaatgcttcatctgaagttgctgttctatatcaagatgttaactgcactgatgtttctacagcaattcatgcagatcaactcacaccagcttggcgcatatattctactggaaacaatgtattccagactcaagcaggctgtcttataggagctgagcatgtcgacacttcttatgagtgcgacattcctattggagctggcatttgtgctagttaccatacagtttctttattacgtagtactagccaaaaatctattgtggcttatactatgtctttaggtgctgatagttcaattgcttactctaataacaccattgctatacctactaacttttcaattagcattactacagaagtaatgcctgtttctatggctaaaacctccgtagattgtaatatgtacatctgcggagattctactgaatgtgctaatttgcttctccaatatggtagcttttgcacacaactaaatcgtnnnnnnnnnnnnnnnnnnnnnnnnnnnnnnnnnnnnnnnnnnnnnnnnnnnnnnnnnnnnnnnnnnnnnnnnnnnnnnnnnnnnnnnnnnnnnnnnnnnntcacaaatattacctgaccctctaaagccaactaagaggtcttttattgaggacttgctctttaataaggtgacactcgctgatgctggcttcatgaagcaatatggcgaatgcctaggtgatattaatgctagagatctcatttgtgcgcagaagttcaatggacttacagtgttgccacctctgctcactgatgatatgattgctgcctacactgctgctctagttagtggtactgccactgctggatggacatttggtgctggcgctgctcttcaaataccttttgctatgcaaatggcatataggttcaatggcattggagttacccaaaatgttctctatgagaaccaaaaacannnnnnnnnnnnnnnnnnnnnnnnnnnnnnnnnnnnnnnnnnnnnnnnnnnnnnnnnnnnnnnnnnnnnnnnnnnnnnnnnnnnnnnnnnnnnnnnnnnngttcttggacaatcaaaaagagttgacttttgtggaaagggctaccaccttatgtccttcccacaagcagccccgcatggtgttgtcttcctacatgtcacgtatgtgccatcccaggagaggaacttcaccacagcgccagcaatttgtcatgaaggcaaagcatacttccctcgtgaaggtgtttttgtgtttaatggcacttcttggtttattacacagaggaacttcttttctccacaaataattactacagacaatacatttgtctcaggaaattgtgatgtcgttattggcatcattaacaacacagtttatgatcctctgcaacctgagcttgactcattcaaagaagagctggacaagtacttcaaaaatcatacatcaccagatgttgatcttggcgacatttcaggcattaacgcttctgtcgtcaacattcaaaaagaaattgaccgcctcaatgaggtcgctaaaaatttaaatgaatcactcattgaccttcaagaattgggaaaatatgagcaatatattaaatggccttggtatgtttggctcggcttcattgctggactaattgccatcgtcatggttacaatcttgctttgttgcatgactagttgttgcagttgcctcaagggtgcatgctcttgtggttcttgctgcaagtttgatgaggatgactctgagccagttctcaagggtgtcaaattacattacacataaacgaacttatggatttgtttatgagattttttactcttggatcaattactgcannnnnnnnnnnnnnnnnnnnnnnnnnnnnnnnnnnnnnnnnnnnnnnnnnnnnnnnnnnnnnnnnnnnnnnnnnnnnnnnnnnnnnnnnnnnnnnnnnnnctcactccctttcggatggcttgttattggcgttgcatttcttgctgtttttcagagcgctaccaataataattgcgctcaataaaagatggcagctagccctttataagggcttccagttcatttgcaatttactgctgctatttgttaccatctattcacatcttttgcttgtcgctgcaggtatggaggcgcaatttttgtacctctatgccttgatatattttctacaatgcatcaacgcatgtagaattattatgagatgttggctttgttggaagtgcaaatccaagaacccattactttatgatgccaactactttgtttgctggcacacacataactatgactactgtataccatataacagtgtcacagatacaattgtcgttactgaaggtgacggcatttcaacaccaaaactcaaagaagactaccaaattggtggttattctgaggataggcactcaggtgttaaagactatgtcgttgtacatggctatttcaccgaagtttactaccagcttgagtctacacaaattactacagacactggtattgaaaatgctacattcttcatctttaacaagcttgttaaagacccaccgaatgtgcaaatacacacaatcnnnnnnnnnnnnnnnnnnnnnnnnnnnnnnnnnnnnnnnnnnnnnnnnnnnnnnnnnnnnnnnnnnnnnnnnnnnnnnnnnnnnnnnnnnnnnnnnnnnnatagttaatagcgtacttctttttcttgctttcgtggtattcttgctagtcacactagccatccttactgcgcttcgattgtgtgcgtactgctgcaatattgttaacgtgagtttagtaaaaccaacggtttacgtctactcgcgtgttaaaaatctgaactcttctgaaggagttcctgatcttctggtctaaacgaactaactattattattattctgtttggaactttaacattgcttatcatggcagacaacggtactattaccgttgaggagcttaaacaactcctggaacaatggaacctagtaataggtttcctattcctagcctggattatgttactacaatttgcctattctaatcggaacaggtttttgtacataataaagcttgttttcctctggctcttgtggccagtaacacttgcttgttttgtgcttgctgctgtctacagaattaattgggtgactggcgggattgcgattgcaatggcttgtattgtaggcttgatgtggcttagctacttcgttgcttccttcaggctgtttgctcgtacccgctcaatgtggtcattcaacccagaaacaaacattcttctcaatgtgcctctccgggggacaattgtgaccagaccgctcatggaaagtgaacttgtcattggtgctgtgatcattcgtggtcacttgcgaatggccggacactccctagggcgctgtgacattaaggacctgccaaaagagatcactgtggctacatnnnnnnnnnnnnnnnnnnnnnnnnnnnnnnnnnnnnnnnnnnnnnnnnnnnnnnnnnnnnnnnnnnnnnnnnnnnnnnnnnnnnnnnnnnnnnnnnnnnngtattggaaactataaattaaatacagaccacgccggtagcaacgacaatattgctttgctagtacagtaagtgacaacagatgtttcatcttgttgacttccaggttacaatagcagagatattgattatcattatgaggactttcaggattgctatttggaatcttgacgttataataagttcaatagtgagacaattatttaagcctctaactaagaagaattattcggagttagatgatgaagaacttatggagttagattatccataaaacgaacatgaaaattattctcttcctgacattgattgtatttacatcttgcgagctatatcactatcaggagtgtgttagaggtacgactgtactactaaaagaaccttgcccatcaggaacatacgagggcaattcaccatttcaccctcttgctgacaataaatttgcactaacttgcactagcacacactttgcttttgcttgtgctgacggtactcgacatacctatcagctgcgtgcaagatcagtttcaccaaaacttttcatcagacaagaggaggttcaacaagagctctactcgccactttttctcattgttgctgctctagtatttttaatactttgcttcaccattaagagaaagacagaatgaatgagctcactttaattgacttctatttgtgctttttagcctttctgctattccttgttttaataatgcttattatattttggttttcactcgaaatccaggatctagaagaaccttgtaccaaagtctaaacgaacatgaaacttctcattgttttgacttgtatttctctatgcagttgcatacgcactgtagtacagcgctgtgcatctaataaacctcatgtgcttgaagatccttgtaaggtacaacactaggggtaatacttatagcactgcttggctttgtgctctaggaaaggttttaccttttcatagatggcacactatggttcaaacatgcacacctaatgttactatcaactgtcaagatccagctggtggtgcgcttatagctaggtgttggtaccttcatgaaggtcaccaaactgctgcatttagagacgtacttgttgttttaaataaacgaacaaattaaaatnnnnnnnnnnnnnnnnnnnnnnnnnnnnnnnnnnnnnnnnnnnnnnnnnnnnnnnnnnnnnnnnnnnnnnnnnnnnnnnnnnnnnnnnnnnnnnnnnnnngcattacatttggtggacccacagattcaactgacaataaccagaatggaggacgcaatggggcaaggccaaaacagcgccgaccccaaggtttacccaataatactgcgtcttggttcacagctctcactcagcatggcaaggaggaacttagattccctcgaggccagggcgttccaatcaacaccaatagtggtccagatgaccaaattggctactaccgaagagctacccgacgagttcgtggtggtgacggcnaaatgaaagagctcagccccagatggtacttctattacctaggaactggcccagaagcttcacttccctacggcgctnacaaagaaggcatcgtatgggttgcaactgagggagccttgaatacacccaaagaccacattggcacccgcaatcctaataacaatgctgccaccgtgctacaacttcctcaaggaacaacattgccaaaaggcttctacgcagagggaagcagaggcggcagtcaagcctcttctcgctcctcatcacgtagtcgcggtaattcaagaaattcaactcctggcagcagtaggggaaattctcctgctcgaatggctagcggaggtggtgaaactgccctcgcgctattgctgctagacagattgaaccagcttgagagcaaagtttctggtaaaggccaacaacaacaaggccaaactgtcactaagaaatctgctgctgaggcatctaaaaagcctcgccaaaaacgtactgccacaaaacagtacaacgtcactcaagcatttgggagacgtggtccagaacaaacccaaggaaatttcggggaccaagacctaatcagacaaggaactgattacaaacattggccgcaaattgcacaatttgctccaagtgcctctgcattctttggaatgtcacgcattggcatggaagtcacaccttcgggaacatggctgacttatcatggagccattaaattggatgacaaagatccacaattcaaagacaacgtcatactgctgaacaagcacattgacgcatacaaaacattcccaccaacagagcctaaaaaggacaaaaagaaaaagactgatgaagctcagcctttgccgcagagacaaaagaagcagcccactgtgactcttcttcctgcggctgacatggatgatttctccagacaacttcaaaattccatgagtggagcttctgctgattcaactcaggcataaacactcatgatgaccacacaaggcagatgggctatgtaaacgttttcgcaattccgtttacgatacatagtctactcttgtgcagaatgaattctcgtaactaaacagcacaagtaggtttagttaactttaatctcacatagcaatctttaatcaatgtgtaacattagggaggacttgaaagagccaccacattttcatcgaggccacgcggagtacgatcgagggtacagtgaataatgctagggagagctgcctatatggaagagccct

SEQ ID NO: 54 - DNA, 29736 bp, Coronavirus
ctacccaggaaaagccaaccaacctcgatctcttgtagatctgttctctaaacgaactttaaaatctgtgtagctgtcgctcggctgcatgcctagtgcacctacgcagtataaacaataataaattttactgtcgttgacaagaaacgagtaactcgtccctcttctgcagactgcttacggtttcgtccgtgttgcagtcgatcatcagcatacctaggtttcgtccgggtgtgaccgaaaggtaagatggagagccttgttcttggtgtcaacgagaaaacacacgtccaactcagtttgcctgtccttcaggttagagacgtgctagtgcgtggcttcggggactctgtggaagaggccctatcggaggcacgtgaacacctcaaaaatggcacttgtggtctagtagagctggaaaaaggcgtactgccccagcttgaacagccctatgtgttcattaaacgttctgatgccttaagcaccaatcacggccacaaggtcgttgagctggttgcagaaatggacggcattcagtacggtcgtagcggtataacactgggagtactcgtgccacatgtgggcgaaaccccaattgcataccgcaatgttcttcttcgtaagaacggtaataagggagccggtggtcatagctatggcatcgatctaaagtcttatgacttaggtgacgagcttggcactgatcccattgaagattatgaacaaaactggaacactaagcatggcagtggtgcactccgtgaactcactcgtgagctcaatggaggtgcagtcactcgctatgtcgacaacaatttctgtggcccagatgggtaccctcttgattgcatcaaagattttctcgcacgcgcgggcaagtcaatgtgcactctttccgaacaacttgattacatcgagtcgaagagaggtgtctactgctgccgtgaccatgagcatgaaattgcctggttcactgagcgctctgataagagctacgagcaccagacacccttcgaaattaagagtgccaagaaatttgacactttcaaaggggaatgcccaaagtttgtgtttcctcttaactcaaaagtcaaagtcattcaaccacgtgttgaaaagaaaaagactgagggtttcatggggcgtatacgctctgtgtaccctgttgcatctccacaggagtgtaacaatatgcacttgtctaccttgatgaaatgtaatcattgcgatgaagtttcatggcagacgtgcgactttctgaaagccacttgtgaacattgtggcactgaaaatttagttattgaaggacctactacatgtgggtacctacctactaatgctgtagtgaaaatgccatgtcctgcctgtcaagacccagagattggacctgagcatagtgttgcagattatcacaaccactcaaacattgaaactcgactccgcaagggaggtaggactagatgttttggaggctgtgtgtttgcctatgttggctgctataataagcgtgcctactgggttcctcgtgctagtgctgatattggctcaggccatactggcattactggtgacaatgtggagaccttgaatgaggatctccttgagatactgagtcgtgaacgtgttaacattaacattgttggcgattttcatttgaatgaagaggttgccatcattttggcatctttctctgcttctacaagtgcctttattgacactataaagagtcttgattacaagtctttcaaaaccattgttgagtcctgcggtaactataaagttaccaagggaaagcccgtaaaaggtgcttggaacattggacaacagagatcagttttaacaccactgtgtggttttccctcacaggctgctggtgttatcagatcaatttttgcgcgcacacttgatgcagcaaaccactcaattcctgatttgcaaagagcagctgtcaccatacttgatggtatttctgaacagtcattacgtcttgtcgacgccatggtttatacttcagacctgctcaccaacagtgtcattattatggcatatgtaactggtggtcttgtacaacagacttctcagtggttgtctaatcttttgggcactactgttgaaaaactcaggcctatctttgaatggattgaggcgaaacttagtgcaggagttgaatttctcaaggatgcttgggagattctcaaatttctcattacaggtgtttttgacatcgtcaagggtcaaatacaggttgcttcagataacatcaaggattgtgtaaaatgcttcattgatgttgttaacaaggcactcgaaatgtgcattgatcaagtcactatcgctggcgcaaagttgcgatcactcaacttaggtgaagtcttcatcgctcaaagcaagggactttaccgtcagtgtatacgtggcaaggagcagctgcaactactcatgcctcttaaggcaccaaaagaagtaacctttcttgaaggtgattcacatgacacagtacttacctctgaggaggttgttctcaagaacggtgaactcgaagcactcgagacgcccgttgatagcttcacaaatggagctatcgttggcacaccagtctgtgtaaatggcctcatgctcttagagattaaggacaaagaacaatactgcgcattgtctcctggtttactggctacaaacaatgtctttcgcttaaaagggggtgcaccaattaaaggtgtaacctttggagaagatactgtttgggaagttcaaggttacaagaatgtgagaatcacatttgagcttgatgaacgtgttgacaaagtgcttaatgaaaagtgctctgtctacactgttgaatccggtaccgaagttactgagtttgcatgtgttgtagcagaggctgttgtgaagactttacaaccagtttctgatctccttaccaacatgggtattgatcttgatgagtggagtgtagctacattctacttatttgatgatgctggtgaagaaaacttttcatcacgtatgtattgttccttttaccctccagatgaggaagaagaggacgatgcagagtgtgaggaagaagaaattgatgaaacctgtgaacatgagtacggtacagaggatgattatcaaggtctccctctggaatttggtgcctcagctgaaacagttcgagttgaggaagaagaagaggaagactggctggatgatactactgagcaatcagagattgagccagaaccagaacctacacctgaagaaccagttaatcagtttactggttatttaaaacttactgacaatgttgccattaaatgtgttgacatcgttaaggaggcacaaagtgctaatcctatggtgattgtaaatgctgctaacatacacctgaaacatggtggtggtgtagcaggtgcactcaacaaggcaaccaatggtgccatgcaaaaggagagtgatgattacattaagctaaatggccctcttacagtaggagggtcttgtttgctttctggacataatcttgctaagaagtgtctgcatgttgttggacctaacctaaatgcaggtgaggacatccagcttcttaaggcagcatatgaaaatttcaattcacaggacatcttacttgcaccattgttgtcagcaggcatatttggtgctaaaccacttcagtctttacaagtgtgcgtgcagacggttcgtacacaggtttatattgcagtcaatgacaaagctctttatgagcaggttgtcatggattatcttgataacctgaagcctagagtggaagcacctaaacaagaggagccaccaaacacagaagattccaaaactgaggagaaatctgtcgtacagaagcctgtcgatgtgaagccaaaaattaaggcctgcattgatgaggttaccacaacactggaagaaactaagtttcttaccaataagttactcttgtttgctgatatcaatggtaagctttaccatgattctcagaacatgcttagaggtgaagatatgtctttccttgagaaggatgcaccttacatggtaggtgatgttatcactagtggtgatatcacttgtgttgtaataccctccaaaaaggctggtggcactactgagatgctctcaagagctttgaagaaagtgccagttgatgagtatataaccacgtaccctggacaaggatgtgctggttatacacttgaggaagctaagactgctcttaagaaatgcaaatctgcattttatgtactaccttcagaagcacctaatgctaaggaagagattctaggaactgtatcctggaatttgagagaaatgcttgctcatgctgaagagacaagaaaattaatgcctatatgcatggatgttagagccataatggcaaccatccaacgtaagtataaaggaattaaaattcaagagggcatcgttgactatggtgtccgattcttcttttatactagtaaagagcctgtagcttctattattacgaagctgaactctctaaatgagccgcttgtcacaatgccaattggttatgtgacacatggttttaatcttgaagaggctgcgcgctgtatgcgttctcttaaagctcctgccgtagtgtcagtatcatcaccagatgctgttactacatataatggatacctcacttcgtcatcaaagacatctgaggagcactttgtagaaacagtttctttggctggctcttacagagattggtcctattcaggacagcgtacagagttaggtgttgaatttcttaagcgtggtgacaaaattgtgtaccacactctggagagccccgtcgagtttcatcttgacggtgaggttctttcacttgacaaactaaagagtctcttatccctgcgggaggttaagactataaaagtgttcacaactgtggacaacactaatctccacacacagcttgtggatatgtctatgacatatggacagcagtttggtccaacatacttggatggtgctgatgttacaaaaattaaacctcatgtaaatcatgagggtaagactttctttgtactacctagtgatgacacactacgtagtgaagctttcgagtactaccatactcttgatgagagttttcttggtaggtacatgtctgctttaaaccacacaaagaaatggaaatttcctcaagttggtggtttaacttcaattaaatgggctgataacaattgttatttgtctagtgttttattagcacttcaacagcttgaagtcaaattcaatgcaccagcacttcaagaggcttattatagagcccgtgctggtgatgctgctaacttttgtgcactcatactcgcttacagtaataaaactgttggcgagcttggtgatgtcagagaaactatgacccatcttctacagcatgctaatttggaatctgcaaagcgagttcttaatgtggtgtgtaaacattgtggtcagaaaactactaccttaacgggtgtagaagctgtgatgtatatgggtactctatcttatgataatcttaagacaggtgtttccattccatgtgtgtgtggtcgtgatgctacacaatatctagtacaacaagagtcttcttttgttatgatgtctgcaccacctgctgagtataaattacagcaaggtacattcttatgtgcgaatgagtacactggtaactatcagtgtggtcattacactcatataactgctaaggagaccctctatcgtattgacggagctcaccttacaaagatgtcagagtacaaaggaccagtgactgatgttttctacaaggaaacatcttacactacaaccatcaagcctgtgtcgtataaactcgatggagttacttacacagagattgaaccaaaattggatgggtattataaaaaggataatgcttactatacagagcagcctatagaccttgtaccaactcaaccattaccaaatgcgagttttgataatttcaaactcacatgttctaacacaaaatttgctgatgatttaaatcaaatgacaggcttcacaaagccagcttcacgagagctatctgtcacattcttcccagacttgaatggcgatgtagtggctattgactatagacactattcagcgagtttcaagaaaggtgctaaattactgcataagccaattgtttggcacattaaccaggctacaaccaagacaacgttcaaaccaaacacttggtgtttacgttgtctttggagtacaaagccagtagatacttcaaattcatttgaagttctggcagtagaagacacacaaggaatggacaatcttgcttgtgaaagtcaacaacccacctctgaagaagtagtggaaaatcctaccatacagaaggaagtcatagagtgtgacgtgaaaactaccgaagttgtaggcaatgtcatacttaaaccatcagatgaaggtgttaaagtaacacaagagttaggtcatgaggatcttatggctgcttatgtggaaaacacaagcattaccattaagaaacctaatgagctttcactagccttaggtttaaaaacaattgccactcatggtattgctgcaattaatagtgttccttggagtaaaattttggcttatgtcaaaccattcttaggacaagcagcaattacaacatcaaattgcgctaagagattagcacaacgtgtgtttaacaattatatgccttatgtgtttacattattgttccaattgtgtacttttactaaaagtaccaattctagaattagagcttcactacctacaactattgctaaaaatagtgttaagagtgttgctaaattatgtttggatgccggcattaattatgtgaagtcacccaaattttctaaattgttcacaatcgctatgtggctattgttgttaagtatttgcttaggttctctaatctgtgtaactgctgcttttggtgtactcttatctaattttggtgctccttcttattgtaatggcgttagagaattgtatcttaattcgtctaacgttactactatggatttctgtgaaggttcttttccttgcagcatttgtttaagtggattagactcccttgattcttatccagctcttgaaaccattcaggtgacgatttcatcgtacaagctagacttgacaattttaggtctggccgctgagtgggttttggcatatatgttgttcacaaaattcttttatttattaggtctttcagctataatgcaggtgttctttggctattttgctagtcatttcatcagcaattcttggctcatgtggtttatcattagtattgtacaaatggcacccgtttctgcaatggttaggatgtacatcttctttgcttctttctactacatatggaagagctatgttcatatcatggatggttgcacctcttcgacttgcatgatgtgctataagcgcaatcgtgccacacgcgttgagtgtacaactattgttaatggcatgaagagatctttctatgtctatgcaaatggaggccgtggcttctgcaagactcacaattggaattgtctcaattgtgacacattttgcactggtagtacattcattagtgatgaagttgctcgtgatttgtcactccagtttaaaagaccaatcaaccctactgaccagtcatcgtatattgttgatagtgttgctgtgaaaaatggcgcgcttcacctctactttgacaaggctggtcaaaagacctatgagagacatccgctctcccattttgtcaatttagacaatttgagagctaacaacactaaaggttcactgcctattaatgtcatagtttttgatggcaagtccaaatgcgacgagtctgcttctaagtctgcttctgtgtactacagtcagctgatgtgccaacctattctgttgcttgaccaagctcttgtatcagacgttggagatagtactgaagtttccgttaagatgtttgatgcttatgtcgacaccttttcagcaacttttagtgttcctatggaaaaacttaaggcacttgttgctacagctcacagcgagttagcaaagggtgtagctttagatggtgtcctttctacattcgtgtcagctgcccgacaaggtgttgttgataccgatgttgacacaaaggatgttattgaatgtctcaaactttcacatcactctgacttagaagtgacaggtgacagttgtaacaatttcatgctcacctataataaggttgaaaacatgacgcccagagatcttggcgcatgtattgactgtaatgcaaggcatatcaatgcccaagtagcaaaaagtcacaatgtttcactcatctggaatgtaaaagactacatgtctttatctgaacagctgcgtaaacaaattcgtagtgctgccaagaagaacaacataccttttagactaacttgtgctacaactagacaggttgtcaatgtcataactactaaaatctcactcaagggtggtaagattgttagtacttgttttaaacttatgcttaaggccacattattgtgcgttcttgctgcattggtttgttatatcgttatgccagtacatacattgtcaatccatgatggttacacaaatgaaatcattggttacaaagccattcaggatggtgtcactcgtgacatcatttctactgatgattgttttgcaaataaacatgctggttttgacgcatggtttagccagcgtggtggttcatacaaaaatgacaaaagctgccctgtagtagctgctatcattacaagagagattggtttcatagtgcctggcttaccgggtactgtgctgagagcaatcaatggtgacttcttgcattttctacctcgtgtttttagtgctgttggcaacatttgctacacaccttccaaactcattgagtatagtgattttgctacctctgcttgcgttcttgctgctgagtgtacaatttttaaggatgctatgggcaaacctgtgccatattgttatgacactaatttgctagagggttctatttcttatagtgagcttcgtccagacactcgttatgtgcttatggatggttccatcatacagtttcctaacacttacctggagggttctgttagagtagtaacaacttttgatgctgagtactgtagacatggtacatgcgaaaggtcagaagtaggtatttgcctatctaccagtggtagatgggttcttaataatgagcattacagagctctatcaggagttttctgtggtgttgatgcgatgaatctcatagctaacatctttactcctcttgtgcaacctgtgggtgctttagatgtgtctgcttcagtagtggctggtggtattattgccatattggtgacttgtgctgcctactactttatgaaattcagacgtgtttttggtgagtacaaccatgttgttgctgctaatgcacttttgtttttgatgtctttcactatactctgtctggtaccagcttacagctttctgccgggagtctactcagtcttttacttgtacttgacattctatttcaccaatgatgtttcattcttggctcaccttcaatggtttgccatgttttctcctattgtgcctttttggataacagcaatctatgtattctgtatttctctgaagcactgccattggttctttaacaactatcttaggaaaagagtcatgtttaatggagttacatttagtaccttcgaggaggctgctttgtgtacctttttgctcaacaaggaaatgtacctaaaattgcgtagcgagacactgttgccacttacacagtataacaggtatcttgctctatataacaagtacaagtatttcagtggagccttagatactaccagctatcgtgaagcagcttgctgccacttagcaaaggctctaaatgactttagcaactcaggtgctgatgttctctaccaaccaccacagacatcaatcacttctgctgttctgcagagtggttttaggaaaatggcattcccgtcaggcaaagttgaagggtgcatggtacaagtaacctgtggaactacaactcttaatggattgtggttggatgacacagtatactgtccaagacatgtcatttgcacagcagaagacatgcttaatcctaactatgaagatctgctcattcgcaaatccaaccatagctttcttgttcaggctggcaatgttcaacttcgtgttattggccattctatgcaaaattgtctgcttaggcttaaagttgatacttctaaccctaagacacccaagtataaatttgtccgtatccaacctggtcaaacattttcagttctagcatgctacaatggttcaccatctggtgtttatcagtgtgccatgagacctaatcataccattaaaggttctttccttaatggatcatgtggtagtgttggttttaacattgattatgattgcgtgtctttctgctatatgcatcatatggagcttccaacaggagtacacgctggtactgacttagaaggtaaattctatggtccatttgttgacagacaaactgcacaggctgcaggtacagacacaaccataacattaaatgttttggcatggctgtatgctgctgttatcaatggtgataggtggtttcttaatagattcaccactactttgaatgactttaaccttgtggcaatgaagtacaactatgaacctttgacacaagatcatgttgacatattgggacctctttctgctcaaacaggaattgccgtcttagatatgtgtgctgctttgaaagagctgctgcagaatggtatgaatggtcgtactatccttggtagcactattttagaagatgagtttacaccatttgatgttgttagacaatgctctggtgttaccttccaaggtaagttcaagaaaattgttaagggcactcatcattggatgcttttaactttcttgacatcactattgattcttgttcaaagtacacagtggtcactgtttttctttgtttacgagaatgctttcttgccatttactcttggtattatggcaattgctgcatgtgctatgctgcttgttaagcataagcacgcattcttgtgcttgtttctgttaccttctcttgcaacagttgcttactttaatatggtctacatgcctgctagctgggtgatgcgtatcatgacatggcttgaattggctgacactagcttgtctggttataggcttaaggattgtgttatgtatgcttcagctttagttttgcttattctcatgacagctcgcactgtttatgatgatgctgctagacgtgtttggacactgatgaatgtcattacacttgtttacaaagtctactatggtaatgctttagatcaagctatttccatgtgggccttagttatttctgtaacctctaactattctggtgtcgttacgactatcatgtttttagctagagctatagtgtttgtgtgtgttgagtattacccattgttatttattactggcaacaccttacagtgtatcatgcttgtttattgtttcttaggctattgttgctgctgctactttggccttttctgtttactcaaccgttacttcaggcttactcttggtgtttatgactacttggtctctacacaagaatttaggtatatgaactcccaggggcttttgcctcctaagagtagtattgatgctttcaagcttaacattaagttgttgggtattggaggtaaaccatgtatcaaggttgctactgtacagtctaaaatgtctgacgtaaagtgcacatctgtggtactgctctcggttcttcaacaacttagagtagagtcatcttctaaattgtgggcacaatgtgtacaactccacaatgatattcttcttgcaaaagacacaactgaagctttcgagaagatggtttctcttttgtctgttttgctatccatgcagggtgctgtagacattaataggttgtgcgaggaaatgctcgataaccgtgctactcttcaggctattgcttcagaatttagttctttaccatcatatgccgcttatgccactgcccaggaggcctatgagcaggctgtagctaatggtgattctgaagtcgttctcaaaaagttaaagaaatctttgaatgtggctaaatctgagtttgaccgtgatgctgccatgcaacgcaagttggaaaagatggcagatcaggctatgacccaaatgtacaaacaggcaagatctgaggacaagagggcaaaagtaactagtgctatgcaaacaatgctcttcactatgcttaggaagcttgataatgatgcacttaacaacattatcaacaatgcgcgtgatggttgtgttccactcaacatcataccattgactacagcagccaaactcatggttgttgtccctgattatggtacctacaagaacacttgtgatggtaacacctttacatatgcatctgcactctgggaaatccagcaagttgttgatgcggatagcaagattgttcaacttagtgaaattaacatggacaattcaccaaatttggcttggcctcttattgttacagctctaagagccaactcagctgttaaactacagaataatgaactgagtccagtagcactacgacagatgtcctgtgcggctggtaccacacaaacagcttgtactgatgacaatgcacttgcctactataacaattcgaagggaggtaggtttgtgctggcattactatcagaccaccaagatctcaaatgggctagattccctaagagtgatggtacaggtacaatttacacagaactggaaccaccttgtaggtttgttacagacacaccaaaagggcctaaagtgaaatacttgtacttcatcaaaggcttaaacaacctaaatagaggtatggtgctgggcagtttagctgctacagtacgtcttcaggctggaaatgctacagaagtacctgccaattcaactgtgctttccttctgtgcttttgcagtagaccctgctaaagcatataaggattacctagcaagtggaggacaaccaatcaccaactgtgtgaagatgttgtgtacacacactggtacaggacaggcaattactgtaacaccagaagctaacatggaccaagagtcctttggtggtgcttcatgttgtctgtattgtagatgccacattgaccatccaaatcctaaaggattctgtgacttgaaaggtaagtacgtccaaatacctaccacttgtgctaatgacccagtgggttttacacttagaaacacagtctgtaccgtctgcggaatgtggaaaggttatggctgtagttgtgaccaactccgcgaacccttgatgcagtctgcggatgcatcaacgtttttaaacgggtttgcggtgtaagtgcagcccgtcttacaccgtgcggcacaggcactagtactgatgtcgtctacagggcttttgatatttacaacgaaaaagttgctggttttgcaaagttcctaaaaactaattgctgtcgcttccaggagaaggatgaggaaggcaatttattagactcttactttgtagttaagaggcatactatgtctaactaccaacatgaagagactatttataacttggttaaagattgtccagcggttgctgtccatgactttttcaagtttagagtagatggtgacatggtaccacatatatcacgtcagcgtctaactaaatacacaatggctgatttagtctatgctctacgtcattttgatgagggtaattgtgatacattaaaagaaatactcgtcacatacaattgctgtgatgatgattatttcaataagaaggattggtatgacttcgtagagaatcctgacatcttacgcgtatatgctaacttaggtgagcgtgtacgccaatcattattaaagactgtacaattctgcgatgctatgcgtgatgcaggcattgtaggcgtactgacattagataatcaggatcttaatgggaactggtacgatttcggtgatttcgtacaagtagcaccaggctgcggagttcctattgtggattcatattactcattgctgatgcccatcctcactttgactagggcattggctgctgagtcccatatggatgctgatctcgcaaaaccacttattaagtgggatttgctgaaatatgattttacggaagagagactttgtctcttcgaccgttattttaaatattgggaccagacataccatcccaattgtattaactgtttggatgataggtgtatccttcattgtgcaaactttaatgtgttattttctactgtgtttccacctacaagttttggaccactagtaagaaaaatatttgtagatggtgttccttttgttgtttcaactggataccattttcgtgagttaggagtcgtacataatcaggatgtaaacttacatagctcgcgtctcagtttcaaggaacttttagtgtatgctgctgatccagctatgcatgcagcttctggcaatttattgctagataaacgcactacatgcttttcagtagctgcactaacaaacaatgttgcttttcaaactgtcaaacccggtaattttaataaagacttttatgactttgctgtgtctaaaggtttctttaaggaaggaagttctgttgaactaaaacacttcttctttgctcaggatggcaacgctgctatcagtgattatgactattatcgttataatctgccaacaatgtgtgatatcagacaactcctattcgtagttgaagttgttgataaatactttgattgttacgatggtggctgtattaatgccaaccaagtaatcgttaacaatctggataaatcagctggtttcccatttaataaatggggtaaggctagactttattatgactcaatgagttatgaggatcaagatgcacttttcgcgtatactaagcgtaatgtcatccctactataactcaaatgaatcttaagtatgccattagtgcaaagaatagagctcgcaccgtagctggtgtctctatctgtagtactatgacaaatagacagtttcatcagaaattattgaagtcaatagccgccactagaggagctactgtggtaattggaacaagcaagttttacggtggctggcataatatgttaaaaactgtttacagtgatgtagaaactccacaccttatgggttgggattatccaaaatgtgacagagccatgcctaacatgcttaggataatggcctctcttgttcttgctcgcaaacataacacttgctgtaacttatcacaccgtttctacaggttagctaacgagtgtgcgcaagtattaagtgagatggtcatgtgtggcggctcactatatgttaaaccaggtggaacatcatccggtgatgctacaactgcttatgctaatagtgtctttaacatttgtcaagctgttacagccaatgtaaatgcacttctttcaactgatggtaataagatagctgacaagtatgtccgcaatctacaacacaggctctatgagtgtctctatagaaatagggatgttgatcatgaattcgtggatgagttttacgcttacctgcgtaaacatttctccatgatgattctttctgatgatgccgttgtgtgctataacagtaactatgcggctcaaggtttagtagctagcattaagaactttaaggcagttctttattatcaaaataatgtgttcatgtctgaggcaaaatgttggactgagactgaccttactaaaggacctcacgaattttgctcacagcatacaatgctagttaaacaaggagatgattacgtgtacctgccttacccagatccatcaagaatattaggcgcaggctgttttgtcgatgatattgtcaaaacagatggtacacttatgattgaaaggttcgtgtcactggctattgatgcttacccacttacaaaacatcctaatcaggagtatgctgatgtctttcacttgtatttacaatacattagaaagttacatgatgagcttactggccacatgttggacatgtattccgtaatgctaactaatgataacacctcacggtactgggaacctgagttttatgaggctatgtacacaccacatacagtcttgcaggctgtaggtgcttgtgtattgtgcaattcacagacttcacttcgttgcggtgcctgtattaggagaccattcctatgttgcaagtgctgctatgaccatgtcatttcaacatcacacaaattagtgttgtctgttaatccctatgtttgcaatgccccaggttgtgatgtcactgatgtgacacaactgtatctaggaggtatgagctattattgcaagtcacataagcctcccattagttttccattatgtgctaatggtcaggtttttggtttatacaaaaacacatgtgtaggcagtgacaatgtcactgacttcaatgcgatagcaacatgtgattggactaatgctggcgattacatacttgccaacacttgtactgagagactcaagcttttcgcagcagaaacgctcaaagccactgaggaaacatttaagctgtcatatggtattgccactgtacgcgaagtactctctgacagagaattgcatctttcatgggaggttggaaaacctagaccaccattgaacagaaactatgtctttactggttaccgtgtaactaaaaatagtaaagtacagattggagagtacacctttgaaaaaggtgactatggtgatgctgttgtgtacagaggtactacgacatacaagttgaatgttggtgattactttgtgttgacatctcacactgtaatgccacttagtgcacctactctagtgccacaagagcactatgtgagaattactggcttgtacccaacactcaacatctcagatgagttttctagcaatgttgcaaattatcaaaaggtcggcatgcaaaagtactctacactccaaggaccacctggtactggtaagagtcattttgccatcggacttgctctctattacccatctgctcgcatagtgtatacggcatgctctcatgcagctgttgatgccctatgtgaaaaggcattaaaatatttgcccatagataaatgtagtagaatcatacctgcgcgtgcgcgcgtagagtgttttgataaattcaaagtgaattcaacactagaacagtatgttttctgcactgtaaatgcattgccagaaacaactgctgacattgtagtctttgatgaaatctctatggctactaattatgacttgagtgttgtcaatgctagacttcgtgcaaaacactacgtctatattggcgatcctgctcaattaccagccccccgcacattgctgactaaaggcacactagaaccagaatattttaattcagtgtgcagacttatgaaaacaataggtccagacatgttccttggaacttgtcgccgttgtcctgctgaaattgttgacactgtgagtgctttagtttatgacaataagctaaaagcacacaaggataagtcagctcaatgcttcaaaatgttctacaaaggtgttattacacatgatgtttcatctgcaatcaacagacctcaaataggcgttgtaagagaatttcttacacgcaatcctgcttggagaaaagctgtttttatctcaccttataattcacagaacgctgtagcttcaaaaatcttaggattgcctacgcagactgttgattcatcacagggttctgaatatgactatgtcatattcacacaaactactgaaacagcacactcttgtaatgtcaaccgtttcaatgtggctatcacaagggcaaaaattggcattttgtgcataatgtctgatagagatctttatgacaaactgcaatttacaagtctagaaataccacgtcgcaatgtggctacattacaagcagaaaatgtaactggactttttaaggactgtagtaagatcattactggtcttcatcctacacaggcacctacacacctcagcgttgatataaagttcaagactgaaggattatgtgttgacataccaggcataccaaaggacatgacctaccgtagactcatctctatgatgggtttcaaaatgaattaccaagtcaatggttaccctaatatgtttatcacccgcgaagaagctattcgtcacgttcgtgcgtggattggctttgatgtagagggctgtcatgcaactagagatgctgtgggtactaacctacctctccagctaggattttctacaggtgttaacttagtagctgtaccgactggttatgttgacactgaaaataacacagaattcaccagagttaatgcaaaacctccaccaggtgaccagtttaaacatcttataccactcatgtataaaggcttgccctggaatgtagtgcgtattaagatagtacaaatgctcagtgatacactgaaaggattgtcagacagagtcgtgttcgtcctttgggcgcatggctttgagcttacatcaatgaagtactttgtcaagattggacctgaaagaacgtgttgtctgtgtgacaaacgtgcaacttgcttttctacttcatcagatacttatgcctgctggaatcattctgtgggttttgactatgtctataacccatttatgattgatgttcagcagtggggctttacgggtaaccttcagagtaaccatgaccaacattgccaggtacatggaaatgcacatgtggctagttgtgatgctatcatgactagatgtttagcagtccatgagtgctttgttaagcgcgttgattggtctgttgaataccctattataggagatgaactgagggttaattctgcttgcagaaaagtacaacacatggttgtgaagtctgcattgcttgctgataagtttccagttcttcatgacattggaaatccaaaggctatcaagtgtgtgcctcaggctgaagtagaatggaagttctacgatgctcagccatgtagtgacaaagcttacaaaatagaggaactcttctattcttatgctacacatcacgataaattcactgatggtgtttgtttgttttggaattgtaacgttgatcgttacccagccaatgcaattgtgtgtaggtttgacacaagagtcttgtcaaacttgaacttaccaggctgtgatggtggtagtttgtatgtgaataagcatgcattccacactccagctttcgataaaagtgcatttactaatttaaagcaattgcctttcttttactattctgatagtccttgtgagtctcatggcaaacaagtagtgtcggatattgattatgttccactcaaatctgctacgtgtattacacgatgcaatttaggtggtgctgtttgcagacaccatgcaaatgagtaccgacagtacttggatgcatataatatgatgatttctgctggatttagcctatggatttacaaacaatttgatacttataacctgtggaatacatttaccaggttacagagtttagaaaatgtggcttataatgttgttaataaaggacactttgatggacacgccggcgaagcacctgtttccatcattaataatgctgtttacacaaaggtagatggtattgatgtggagatctttgaaaataagacaacacttcctgttaatgttgcatttgagctttgggctaagcgtaacattaaaccagtgccagagattaagatactcaataatttgggtgttgatatcgctgctaatactgtaatctgggactacaaaagagaagccccagcacatgtatctacaataggtgtctgcacaatgactgacattgccaagaaacctactgagagtgcttgttcttcacttactgtcttgtttgatggtagagtggaaggacaggtagacctttttagaaacgcccgtaatggtgttttaataacagaaggttcagtcaaaggtctaacaccttcaaagggaccagcacaagctagcgtcaatggagtcacattaattggagaatcagtaaaaacacagtttaactactttaagaaagtagacggcattattcaacagttgcctgaaacctactttactcagagcagagacttagaggattttaagcccagatcacaaatggaaactgactttctcgagctcgctatggatgaattcatacagcgatataagctcgagggctatgccttcgaacacatcgtttatggagatttcagtcatggacaacttggcggtcttcatttaatgataggcttagccaagcgctcacaagattcaccacttaaattagaggattttatccctatggacagcacagtgaaaaattacttcataacagatgcgcaaacaggttcatcaaaatgtgtgtgttctgtgattgatcttttacttgatgactttgtcgagataataaagtcacaagatttgtcagtgatttcaaaagtggtcaaggttacaattgactatgctgaaatttcattcatgctttggtgtaaggatggacatgttgaaaccttctacccaaaactacaagcaagtcaagcgtggcaaccaggtgttgcgatgcctaacttgtacaagatgcaaagaatgcttcttgaaaagtgtgaccttcagaattatggtgaaaatgctgttataccaaaaggaataatgatgaatgtcgcaaagtatactcaactgtgtcaatacttaaatacacttactttagctgtaccctacaacatgagagttattcactttggtgctggctctgataaaggagttgcaccaggtacagctgtgctcagacaatggttgccaactggcacactacttgtcgattcagatcttaatgacttcgtctccgacgcagattctactttaattggagactgtgcaacagtacatacggctaataaatgggaccttattattagcgatatgtatgaccctaggaccaaacatgtgacaaaagagaatgactctaaagaagggtttttcacttatctgtgtggatttataaagcaaaaactagccctgggtggttctatagctgtaaagataacagagcattcttggaatgctgacctttacaagcttatgggccatttctcatggtggacagcttttgttacaaatgtaaatgcatcatcatcggaagcatttttaattggggctaactatcttggcaagccgaaggaacaaattgatggctataccatgcatgctaactacattttctggaggaacacaaatcctatccagttgtcttcctattcactctttgacatgagcaaatttcctcttaaattaagaggaactgctgtaatgtctcttaaggagaatcaaatcaatgatatgatttattctcttctggaaaaaggtaggcttatcattagagaaaacaacagagttgtggtttcaagtgatattcttgttaacaactaaacgaacatgtttattttcttattatttcttactctcactagtggtagtgaccttgaccggtgcaccacttttgatgatgttcaagctcctaattacactcaacatacttcatctatgaggggggtttactatcctgatgaaatttttagatcagacactctttatttaactcaggatttatttcttccattttattctaatgttacagggtttcatactattaatcatacgtttggcaaccctgtcataccttttaaggatggtatttattttgctgccacagagaaatcaaatgttgtccgtggttgggtttttggttctaccatgaacaacaagtcacagtcggtgattattattaacaattctactaatgttgttatacgagcatgtaactttgaattgtgtgacaaccctttctttgctgtttctaaacccatgggtacacagacacatactatgatattcgataatgcatttaattgcactttcgagtacatatctgatgccttttcgcttgatgtttcagaaaagtcaggtaattttaaacacttacgagagtttgtgtttaaaaataaagatgggtttctctatgtttataagggctatcaacctatagatgtagttcgtgatctaccttctggttttaacactttgaaacctatttttaagttgcctcttggtattaacattacaaattttagagccattcttacagccttttcacctgctcaagacatttggggcacgtcagctgcagcctattttgttggctatttaaagccaactacatttatgctcaagtatgatgaaaatggtacaatcacagatgctgttgattgttctcaaaatccacttgctgaactcaaatgctctgttaagagctttgagattgacaaaggaatttaccagacctctaatttcagggttgttccctcaggagatgttgtgagattccctaatattacaaacttgtgtccttttggagaggtttttaatgctactaaattcccttctgtctatgcatgggagagaaaaaaaatttctaattgtgttgctgattactctgtgctctacaactcaacatttttttcaacctttaagtgctatggcgtttctgccactaagttgaatgatctttgcttctccaatgtctatgcagattcttttgtagtcaagggagatgatgtaagacaaatagcgccaggacaaactggtgttattgctgattataattataaattgccagatgatttcatgggttgtgtccttgcttggaatactaggaacattgatgctacttcaactggtaattataattataaatataggtatcttagacatggcaagcttaggccctttgagagagacatatctaatgtgcctttctcccctgatggcaaaccttgcaccccacctgctcttaattgttattggccattaaatgattatggtttttacaccactactggcattggctaccaaccttacagagttgtagtactttcttttgaacttttaaatgcaccggccacggtttgtggaccaaaattatccactgaccttattaagaaccagtgtgtcaattttaattttaatggactcactggtactggtgtgttaactccttcttcaaagagatttcaaccatttcaacaatttggccgtgatgtttctgatttcactgattccgttcgagatcctaaaacatctgaaatattagacatttcaccttgctcttttgggggtgtaagtgtaattacacctggaacaaatgcttcatctgaagttgctgttctatatcaagatgttaactgcactgatgtttctacagcaattcatgcagatcaactcacaccagcttggcgcatatattctactggaaacaatgtattccagactcaagcaggctgtcttataggagctgagcatgtcgacacttcttatgagtgcgacattcctattggagctggcatttgtgctagttaccatacagtttctttattacgtagtactagccaaaaatctattgtggcttatactatgtctttaggtgctgatagttcaattgcttactctaataacaccattgctatacctactaacttttcaattagcattactacagaagtaatgcctgtttctatggctaaaacctccgtagattgtaatatgtacatctgcggagattctactgaatgtgctaatttgcttctccaatatggtagcttttgcacacaactaaatcgtgcactctcaggtattgctgctgaacaggatcgcaacacacgtgaagtgttcgctcaagtcaaacaaatgtacaaaaccccaactttgaaatattttggtggttttaatttttcacaaatattacctgaccctctaaagccaactaagaggtcttttattgaggacttgctctttaataaggtgacactcgctgatgctggcttcatgaagcaatatggcgaatgcctaggtgatattaatgctagagatctcatttgtgcgcagaagttcaatggacttacagtgttgccacctctgctcactgatgatatgattgctgcctacactgctgctctagttagtggtactgccactgctggatggacatttggtgctggcgctgctcttcaaataccttttgctatgcaaatggcatataggttcaatggcattggagttacccaaaatgttctctatgagaaccaaaaacaaatcgccaaccaatttaacaaggcgattagtcaaattcaagaatcacttacaacaacatcaactgcattgggcaagctgcaagacgttgttaaccagaatgctcaagcattaaacacacttgttaaacaacttagctctaattttggtgcaatttcaagtgtgctaaatgatatcctttcgcgacttgataaagtcgaggcggaggtacaaattgacaggttaattacaggcagacttcaaagccttcaaacctatgtaacacaacaactaatcagggctgctgaaatcagggcttctgctaatcttgctgctactaaaatgtctgagtgtgttcttggacaatcaaaaagagttgacttttgtggaaagggctaccaccttatgtccttcccacaagcagccccgcatggtgttgtcttcctacatgtcacgtatgtgccatcccaggagaggaacttcaccacagcgccagcaatttgtcatgaaggcaaagcatacttccctcgtgaaggtgtttttgtgtttaatggcacttcttggtttattacacagaggaacttcttttctccacaaataattactacagacaatacatttgtctcaggaaattgtgatgtcgttattggcatcattaacaacacagtttatgatcctctgcaacctgagcttgactcattcaaagaagagctggacaagtacttcaaaaatcatacatcaccagatgttgatcttggcgacatttcaggcattaacgcttctgtcgtcaacattcaaaaagaaattgaccgcctcaatgaggtcgctaaaaatttaaatgaatcactcattgaccttcaagaattgggaaaatatgagcaatatattaaatggccttggtatgtttggctcggcttcattgctggactaattgccatcgtcatggttacaatcttgctttgttgcatgactagttgttgcagttgcctcaagggtgcatgctcttgtggttcttgctgcaagtttgatgaggatgactctgagccagttctcaagggtgtcaaattacattacacataaacgaacttatggatttgtttatgagattttttactcttggatcaattactgcacagccagtaaaaattgacaatgcttctcctgcaagtactgttcatgctacagcaacgataccgctacaagcctcactccctttcggatggcttgttattggcgttgcatttcttgctgtttttcagagcgctaccaaaataattgcgctcaataaaagatggcagctagccctttataagggcttccagttcatttgcaatttactgctgctatttgttaccatctattcacatcttttgcttgtcgctgcaggtatggaggcgcaatttttgtacctctatgccttgatatattttctacaatgcatcaacgcatgtagaattattatgagatgttggctttgttggaagtgcaaatccaagaacccattactttatgatgccaactactttgtttgctggcacacacataactatgactactgtataccatataacagtgtcacagatacaattgtcgttactgaaggtgacggcatttcaacaccaaaactcaaagaagactaccaaattggtggttattctgaggataggcactcaggtgttaaagactatgtcgttgtacatggctatttcaccgaagtttactaccagcttgagtctacacaaattactacagacactggtattgaaaatgctacattcttcatctttaacaagcttgttaaagacccaccgaatgtgcaaatacacacaatcgacggctcttcaggagttgctaatccagcaatggatccaatttatgatgagccgacgacgactactagcgtgcctttgtaagcacaagaaagtgagtacgaacttatgtactcattcgtttcggaagaaacaggtacgttaatagttaatagcgtacttctttttcttgctttcgtggtattcttgctagtcacactagccatccttactgcgcttcgattgtgtgcgtactgctgcaatattgttaacgtgagtttagtaaaaccaacggtttacgtctactcgcgtgttaaaaatctgaactcttctgaaggagttcctgatcttctggtctaaacgaactaactattattattattctgtttggaactttaacattgcttatcatggcagacaacggtactattaccgttgaggagcttaaacaactcctggaacaatggaacctagtaataggtttcctatgcctagcctggattatgttactacaatttgcctattctaatcggaacaggtttttgtacataataaagcttgttttcctctggctcttgtggccagtaacacttgcttgttttgtgcttgctgctgtctacagaattaattgggtgactggcgggattgcgattgcaatggcttgtattgtaggcttgatgtggcttagctacttcgttgcttccttcaggctgtttgctcgtacccgctcaatgtggtcattcaacccagaaacaaacattcttctcaatgtgcctctccgggggacaattgtgaccagaccgctcatggaaagtgaacttgtcattggtgctgtgatcattcgtggtcacttgcgaatggccggacactccctagggcgctgtgacattaaggacctgccaaaagagatcactgtggctacatcacgaacgctttcttattacaaattaggagcgtcgcagcgtgtaggcactgattcaggttttgctgcatacaaccgctaccgtattggaaactataaattaaatacagaccacgccggtagcaacgacaatattgctttgctagtacagtaagtgacaacagatgtttcatcttgttgacttccaggttacaatagcagagatattgattatcattatgaggactttcaggattgctatttggaatcttgacgttataataagttcaatagtgagacaattatttaagcctctaactaagaagaattattcggagttagatgatgaagaacctatggagttagattatccataaaacgaacatgaaaattattctcttcctgacattgattgtatttacatcttgcgagctatatcactatcaggagtgtgttagaggtacgactgtactactaaaagaaccttgcccatcaggaacatacgagggcaattcaccatttcaccctcttgctgacaataaatttgcactaacttgcactagcacacactttgcttttgcttgtgctgacggtactcgacatacctatcagctgcgtgcaagatcagtttcaccaaaacttttcatcagacaagaggaggttcaacaagagctctactcgccactttttctcattgttgctgctctagtatttttaatactttgcttcaccattaagagaaagacagaatgaatgagctcactttaattgacttctatttgtgctttttagcctttctgctattccttgttttaataatgcttattatattttggttttcactcgaaatccaggatctagaagaaccttgtaccaaagtctaaacgaacatgaaacttctcattgttttgacttgtatttctctatgcagttgcatatgcactgtagtacagcgctgtgcatctaataaacctcatgtgcttgaagatccttgtaaggtacaacactaggggtaatacttatagcactgcttggctttgtgctctaggaaaggttttaccttttcatagatggcacactatggttcaaacatgcacacctaatgttactatcaactgtcaagatccagctggtggtgcgcttatagctaggtgttggtaccttcatgaaggtcaccaaactgctgcatttagagacgtacttgttgttttaaataaacgaacaaattaaaatgtctgataatggaccccaatcaaaccaacgtagtgccccccgcattacatttggtggacccacagattcaactgacaataaccagaatggaggacgcaatggggcaaggccaaaacagcgccgaccccaaggtttacccaataatactgcgtcttggttcacagctctcactcagcatggcaaggaggaacttagattccctcgaggccagggcgttccaatcaacaccaatagtggtccagatgaccaaattggctactaccgaagagctacccgacgagttcgtggtggtgacggcaaaatgaaagagctcagccccagatggtacttctattacctaggaactggcccagaagcttcacttccctacggcgctaacaaagaaggcatcgtatgggttgcaactgagggagccttgaatacacccaaagaccacattggcacccgcaatcctaataacaatgctgccaccgtgctacaacttcctcaaggaacaacattgccaaaaggcttctacgcagagggaagcagaggcggcagtcaagcctcttctcgctcctcatcacgtagtcgctgtaattcaagaaattcaactcctggcagcagtaggggaaattctcctgctcgaatggctagcggaggtggtgaaactgccctcgcgctattgctgctagacagattgaaccagcttgagagcaaagtttctggtaaaggccaacaacaacaaggccaaactgtcactaagaaatctgctgctgaggcatctaaaaagcctcgccaaaaacgtactgccacaaaacagtacaacgtcactcaagcatttgggagacgtggtccagaacaaacccaaggaaatttcggggaccaagacctaatcagacaaggaactgattacaaacattggccgcaaattgcacaatttgctccaagtgcctctgcattctttggaatgtcacgcattggcatggaagtcacaccttcgggaacatggctgacttatcatggagccattaaattggatgacaaagatccacaattcaaagacaacgtcatactgctgaacaagcacattgacgcatacaaaacattcccaccaacagagcctaaaaaggacaaaaagaaaaagactgatgaagctcagcctttgccgcagagacaaaagaagcagcccactgtgactcttcttcctgcggctgacatggatgatttctccagacaacttcaaaattccatgagtggagcttctgctgattcaactcaggcataaacactcatgatgaccacacaaggcagatgggctatgtaaacgttttcgcaattccgtttacgatacatagtctactcttgtgcagaatgaattctcgtaactaaacagcacaagtaggtttagttaactttaatctcacatagcaatctttaatcaatgtgtaacattagggaggacttgaaagagccaccacattttcatcgaggccacgcggagtacgatcgagggtacagtgaataatgctagggagagctgcctatatggaagagccctaatgtgtaaaattaattttagtagtgctatccccatgtgattttaatagcttcttaggagaatgacaaaaaaaaaaaaaaaaaaaaaaaa

SEQ ID NO: 55 - DNA, 29736 bp, Coronavirus
ctacccaggaaaagccaaccaacctcgatctcttgtagatctgttctctaaacgaactttaaaatctgtgtagctgtcgctcggctgcatgcctagtgcacctacgcagtataaacaataataaattttactgtcgttgacaagaaacgagtaactcgtccctcttctgcagactgcttacggtttcgtccgtgttgcagtcgatcatcagcatacctaggtttcgtccgggtgtgaccgaaaggtaagatggagagccttgttcttggtgtcaacgagaaaacacacgtccaactcagtttgcctgtccttcaggttagagacgtgctagtgcgtggcttcggggactctgtggaagaggccctatcggaggcacgtgaacacctcaaaaatggcacttgtggtctagtagagctggaaaaaggcgtactgccccagcttgaacagccctatgtgttcattaaacgttctgatgccttaagcaccaatcacggccacaaggtcgttgagctggttgcagaaatggacggcattcagtacggtcgtagcggtataacactgggagtactcgtgccacatgtgggcgaaaccccaattgcataccgcaatgttcttcttcgtaagaacggtaataagggagccggtggtcatagctatggcatcgatctaaagtcttatgacttaggtgacgagcttggcactgatcccattgaagattatgaacaaaactggaacactaagcatggcagtggtgcactccgtgaactcactcgtgagctcaatggaggtgcagtcactcgctatgtcgacaacaatttctgtggcccagatgggtaccctcttgattgcatcaaagattttctcgcacgcgcgggcaagtcaatgtgcactctttccgaacaacttgattacatcgagtcgaagagaggtgtctactgctgccgtgaccatgagcatgaaattgcctggttcactgagcgctctgataagagctacgagcaccagacacccttcgaaattaagagtgccaagaaatttgacactttcaaaggggaatgcccaaagtttgtgtttcctcttaactcaaaagtcaaagtcattcaaccacgtgttgaaaagaaaaagactgagggtttcatggggcgtatacgctctgtgtaccctgttgcatctccacaggagtgtaacaatatgcacttgtctaccttgatgaaatgtaatcattgcgatgaagtttcatggcagacgtgcgactttctgaaagccacttgtgaacattgtggcactgaaaatttagttattgaaggacctactacatgtgggtacctacctactaatgctgtagtgaaaatgccatgtcctgcctgtcaagacccagagattggacctgagcatagtgttgcagattatcacaaccactcaaacattgaaactcgactccgcaagggaggtaggactagatgttttggaggctgtgtgtttgcctatgttggctgctataataagcgtgcctactgggttcctcgtgctagtgctgatattggctcaggccatactggcattactggtgacaatgtggagaccttgaatgaggatctccttgagatactgagtcgtgaacgtgttaacattaacattgttggcgattttcatttgaatgaagaggttgccatcattttggcatctttctctgcttctacaagtgcctttattgacactataaagagtcttgattacaagtctttcaaaaccattgttgagtcctgcggtaactataaagttaccaagggaaagcccgtaaaaggtgcttggaacattggacaacagagatcagttttaacaccactgtgtggttttccctcacaggctgctggtgttatcagatcaatttttgcgcgcacacttgatgcagcaaaccactcaattcctgatttgcaaagagcagctgtcaccatacttgatggtatttctgaacagtcattacgtcttgtcgacgccatggtttatacttcagacctgctcaccaacagtgtcattattatggcatatgtaactggtggtcttgtacaacagacttctcagtggttgtctaatcttttgggcactactgttgaaaaactcaggcctatctttgaatggattgaggcgaaacttagtgcaggagttgaatttctcaaggatgcttgggagattctcaaatttctcattacaggtgtttttgacatcgtcaagggtcaaatacaggttgcttcagataacatcaaggattgtgtaaaatgcttcattgatgttgttaacaaggcactcgaaatgtgcattgatcaagtcactatcgctggcgcaaagttgcgatcactcaacttaggtgaagtcttcatcgctcaaagcaagggactttaccgtcagtgtatacgtggcaaggagcagctgcaactactcatgcctcttaaggcaccaaaagaagtaacctttcttgaaggtgattcacatgacacagtacttacctctgaggaggttgttctcaagaacggtgaactcgaagcactcgagacgcccgttgatagcttcacaaatggagctatcgttggcacaccagtctgtgtaaatggcctcatgctcttagagattaaggacaaagaacaatactgcgcattgtctcctggtttactggctacaaacaatgtctttcgcttaaaagggggtgcaccaattaaaggtgtaacctttggagaagatactgtttgggaagttcaaggttacaagaatgtgagaatcacatttgagcttgatgaacgtgttgacaaagtgcttaatgaaaagtgctctgtctacactgttgaatccggtaccgaagttactgagtttgcatgtgttgtagcagaggctgttgtgaagactttacaaccagtttctgatctccttaccaacatgggtattgatcttgatgagtggagtgtagctacattctacttatttgatgatgctggtgaagaaaacttttcatcacgtatgtattgttccttttaccctccagatgaggaagaagaggacgatgcagagtgtgaggaagaagaaattgatgaaacctgtgaacatgagtacggtacagaggatgattatcaaggtctccctctggaatttggtgcctcagctgaaacagttcgagttgaggaagaagaagaggaagactggctggatgatactactgagcaatcagagattgagccagaaccagaacctacacctgaagaaccagttaatcagtttactggttatttaaaacttactgacaatgttgccattaaatgtgttgacatcgttaaggaggcacaaagtgctaatcctatggtgattgtaaatgctgctaacatacacctgaaacatggtggtggtgtagcaggtgcactcaacaaggcaaccaatggtgccatgcaaaaggagagtgatgattacattaagctaaatggccctcttacagtaggagggtcttgtttgctttctggacataatcttgctaagaagtgtctgcatgttgttggacctaacctaaatgcaggtgaggacatccagcttcttaaggcagcatatgaaaatttcaattcacaggacatcttacttgcaccattgttgtcagcaggcatatttggtgctaaaccacttcagtctttacaagtgtgcgtgcagacggttcgtacacaggtttatattgcagtcaatgacaaagctctttatgagcaggttgtcatggattatcttgataacctgaagcctagagtggaagcacctaaacaagaggagccaccaaacacagaagattccaaaactgaggagaaatctgtcgtacagaagcctgtcgatgtgaagccaaaaattaaggcctgcattgatgaggttaccacaacactggaagaaactaagtttcttaccaataagttactcttgtttgctgatatcaatggtaagctttaccatgattctcagaacatgcttagaggtgaagatatgtctttccttgagaaggatgcaccttacatggtaggtgatgttatcactagtggtgatatcacttgtgttgtaataccctccaaaaaggctggtggcactactgagatgctctcaagagctttgaagaaagtgccagttgatgagtatataaccacgtaccctggacaaggatgtgctggttatacacttgaggaagctaagactgctcttaagaaatgcaaatctgcattttatgtactaccttcagaagcacctaatgctaaggaagagattctaggaactgtatcctggaatttgagagaaatgcttgctcatgctgaagagacaagaaaattaatgcctatatgcatggatgttagagccataatggcaaccatccaacgtaagtataaaggaattaaaattcaagagggcatcgttgactatggtgtccgattcttcttttatactagtaaagagcctgtagcttctattattacgaagctgaactctctaaatgagccgcttgtcacaatgccaattggttatgtgacacatggttttaatcttgaagaggctgcgcgctgtatgcgttctcttaaagctcctgccgtagtgtcagtatcatcaccagatgctgttactacatataatggatacctcacttcgtcatcaaagacatctgaggagcactttgtagaaacagtttctttggctggctcttacagagattggtcctattcaggacagcgtacagagttaggtgttgaatttcttaagcgtggtgacaaaattgtgtaccacactctggagagccccgtcgagtttcatcttgacggtgaggttctttcacttgacaaactaaagagtctcttatccctgcgggaggttaagactataaaagtgttcacaactgtggacaacactaatctccacacacagcttgtggatatgtctatgacatatggacagcagtttggtccaacatacttggatggtgctgatgttacaaaaattaaacctcatgtaaatcatgagggtaagactttctttgtactacctagtgatgacacactacgtagtgaagctttcgagtactaccatactcttgatgagagttttcttggtaggtacatgtctgctttaaaccacacaaagaaatggaaatttcctcaagttggtggtttaacttcaattaaatgggctgataacaattgttatttgtctagtgttttattagcacttcaacagcttgaagtcaaattcaatgcaccagcacttcaagaggcttattatagagcccgtgctggtgatgctgctaacttttgtgcactcatactcgcttacagtaataaaactgttggcgagcttggtgatgtcagagaaactatgacccatcttctacagcatgctaatttggaatctgcaaagcgagttcttaatgtggtgtgtaaacattgtggtcagaaaactactaccttaacgggtgtagaagctgtgatgtatatgggtactctatcttatgataatcttaagacaggtgtttccattccatgtgtgtgtggtcgtgatgctacacaatatctagtacaacaagagtcttcttttgttatgatgtctgcaccacctgctgagtataaattacagcaaggtacattcttatgtgcgaatgagtacactggtaactatcagtgtggtcattacactcatataactgctaaggagaccctctatcgtattgacggagctcaccttacaaagatgtcagagtacaaaggaccagtgactgatgttttctacaaggaaacatcttacactacaaccatcaagcctgtgtcgtataaactcgatggagttacttacacagagattgaaccaaaattggatgggtattataaaaaggataatgcttactatacagagcagcctatagaccttgtaccaactcaaccattaccaaatgcgagttttgataatttcaaactcacatgttctaacacaaaatttgctgatgatttaaatcaaatgacaggcttcacaaagccagcttcacgagagctatctgtcacattcttcccagacttgaatggcgatgtagtggctattgactatagacactattcagcgagtttcaagaaaggtgctaaattactgcataagccaattgtttggcacattaaccaggctacaaccaagacaacgttcaaaccaaacacttggtgtttacgttgtctttggagtacaaagccagtagatacttcaaattcatttgaagttctggcagtagaagacacacaaggaatggacaatcttgcttgtgaaagtcaacaacccacctctgaagaagtagtggaaaatcctaccatacagaaggaagtcatagagtgtgacgtgaaaactaccgaagttgtaggcaatgtcatacttaaaccatcagatgaaggtgttaaagtaacacaagagttaggtcatgaggatcttatggctgcttatgtggaaaacacaagcattaccattaagaaacctaatgagctttcactagccttaggtttaaaaacaattgccactcatggtattgctgcaattaatagtgttccttggagtaaaattttggcttatgtcaaaccattcttaggacaagcagcaattacaacatcaaattgcgctaagagattagcacaacgtgtgtttaacaattatatgccttatgtgtttacattattgttccaattgtgtacttttactaaaagtaccaattctagaattagagcttcactacctacaactattgctaaaaatagtgttaagagtgttgctaaattatgtttggatgccggcattaattatgtgaagtcacccaaattttctaaattgttcacaatcgctatgtggctattgttgttaagtatttgcttaggttctctaatctgtgtaactgctgcttttggtgtactcttatctaattttggtgctccttcttattgtaatggcgttagagaattgtatcttaattcgtctaacgttactactatggatttctgtgaaggttcttttccttgcagcatttgtttaagtggattagactcccttgattcttatccagctcttgaaaccattcaggtgacgatttcatcgtacaagctagacttgacaattttaggtctggccgctgagtgggttttggcatatatgttgttcacaaaattcttttatttattaggtctttcagctataatgcaggtgttctttggctattttgctagtcatttcatcagcaattcttggctcatgtggtttatcattagtattgtacaaatggcacccgtttctgcaatggttaggatgtacatcttctttgcttctttctactacatatggaagagctatgttcatatcatggatggttgcacctcttcgacttgcatgatgtgctataagcgcaatcgtgccacacgcgttgagtgtacaactattgttaatggcatgaagagatctttctatgtctatgcaaatggaggccgtggcttctgcaagactcacaattggaattgtctcaattgtgacacattttgcactggtagtacattcattagtgatgaagttgctcgtgatttgtcactccagtttaaaagaccaatcaaccctactgaccagtcatcgtatattgttgatagtgttgctgtgaaaaatggcgcgcttcacctctactttgacaaggctggtcaaaagacctatgagagacatcctctctcccattttgtcaatttagacaatttgagagctaacaacactaaaggttcactgcctattaatgtcatagtttttgatggcaagtccaaatgcgacgagtctgcttctaagtctgcttctgtgtactacagtcagctgatgtgccaacctattctgttgcttgaccaagctcttgtatcagacgttggagatagtactgaagtttccgttaagatgtttgatgcttatgtcgacaccttttcagcaacttttagtgttcctatggaaaaacttaaggcacttgttgctacagctcacagcgagttagcaaagggtgtagctttagatggtgtcctttctacattcgtgtcagctgcccgacaaggtgttgttgataccgatgttgacacaaaggatgttattgaatgtctcaaactttcacatcactctgacttagaagtgacaggtgacagttgtaacaatttcatgctcacctataataaggttgaaaacatgacgcccagagatcttggcgcatgtattgactgtaatgcaaggcatatcaatgcccaagtagcaaaaagtcacaatgtttcactcatctggaatgtaaaagactacatgtctttatctgaacagctgcgtaaacaaattcgtagtgctgccaagaagaacaacataccttttagactaacttgtgctacaactagacaggttgtcaatgtcataactactaaaatctcactcaagggtggtaagattgttagtacttgttttaaacttatgcttaaggccacattattgtgcgttcttgctgcattggtttgttatatcgttatgccagtacatacattgtcaatccatgatggttacacaaatgaaatcattggttacaaagccattcaggatggtgtcactcgtgacatcatttctactgatgattgttttgcaaataaacatgctggttttgacgcatggtttagccagcgtggtggttcatacaaaaatgacaaaagctgccctgtagtagctgctatcattacaagagagattggtttcatagtgcctggcttaccgggtactgtgctgagagcaatcaatggtgacttcttgcattttctacctcgtgtttttagtgctgttggcaacatttgctacacaccttccaaactcattgagtatagtgattttgctacctctgcttgcgttcttgctgctgagtgtacaatttttaaggatgctatgggcaaacctgtgccatattgttatgacactaatttgctagagggttctatttcttatagtgagcttcgtccagacactcgttatgtgcttatggatggttccatcatacagtttcctaacacttacctggagggttctgttagagtagtaacaacttttgatgctgagtactgtagacatggtacatgcgaaaggtcagaagtaggtatttgcctatctaccagtggtagatgggttcttaataatgagcattacagagctctatcaggagttttctgtggtgttgatgcgatgaatctcatagctaacatctttactcctcttgtgcaacctgtgggtgctttagatgtgtctgcttcagtagtggctggtggtattattgccatattggtgacttgtgctgcctactactttatgaaattcagacgtgcttttggtgagtacaaccatgttgttgctgctaatgcacttttgtttttgatgtctttcactatactctgtctggcaccagcttacagctttctgccgggagtctactcagtcttttacttgtacttgacattctatttcaccaatgatgtttcattcttggctcaccttcaatggtttgccatgttttctcctattgtgcctttttggataacagcaatctatgtattctgtatttctctgaagcactgccattggttctttaacaactatcttaggaaaagagtcatgtttaatggagttacatttagtaccttcgaggaggctgctttgtgtacctttttgctcaacaaggaaatgtacctaaaattgcgtagcgagacactgttgccacttacacagtataacaggtatcttgctctatataacaagtacaagtatttcagtggagccttagatactaccagctatcgtgaagcagcttgctgccacttagcaaaggctctaaatgactttagcaactcaggtgctgatgttctctaccaaccaccacagacatcaatcacttctgctgttctgcagagtggttttaggaaaatggcattcccgtcaggcaaagttgaagggtgcatggtacaagtaacctgtggaactacaactcttaatggattgtggttggatgacacagtatactgtccaagacatgtcatttgcacagcagaagacatgcttaatcctaactatgaagatctgctcattcgcaaatccaaccatagctttcttgttcaggctggcaatgttcaacttcgtgttattggccattctatgcaaaattgtctgcttaggcttaaagttgatacttctaaccctaagacacccaagtataaatttgtccgtatccaacctggtcaaacattttcagttctagcatgctacaatggttcaccatctggtgtttatcagtgtgccatgagacctaatcataccattaaaggttctttccttaatggatcatgtggtagtgttggttttaacattgattatgattgcgtgtctttctgctatatgcatcatatggagcttccaacaggagtacacgctggtactgacttagaaggtaaattctatggtccatttgttgacagacaaactgcacaggctgcaggtacagacacaaccataacattaaatgttttggcatggctgtatgctgctgttatcaatggtgataggtggtttcttaatagattcaccactactttgaatgactttaaccttgtggcaatgaagtacaactatgaacctttgacacaagatcatgttgacatattgggacctctttctgctcaaacaggaattgccgtcttagatatgtgtgctgctttgaaagagctgctgcagaatggtatgaatggtcgtactatccttggtagcactattttagaagatgagtttacaccatttgatgttgttagacaatgctctggtgttaccttccaaggtaagttcaagaaaattgttaagggcactcatcattggatgcttttaactttcttgacatcactattgattcttgttcaaagtacacagtggtcactgtttttctttgtttacgagaatgctttcttgccatttactcttggtattatggcaattgctgcatgtgctatgctgcttgttaagcataagcacgcattcttgtgcttgtttctgttaccttctcttgcaacagttgcttactttaatatggtctacatgcctgctagctgggtgatgcgtatcatgacatggcttgaattggctgacactagcttgtctggttataggcttaaggattgtgttatgtatgcttcagctttagttttgcttattctcatgacagctcgcactgtttatgatgatgctgctagacgtgtttggacactgatgaatgtcattacacttgtttacaaagtctactatggtaatgctttagatcaagctatttccatgtgggccttagttatttctgtaacctctaactattctggtgtcgttacgactatcatgtttttagctagagctatagtgtttgtgtgtgttgagtattacccattgttatttattactggcaacaccttacagtgtatcatgcttgtttattgtttcttaggctattgttgctgctgctactttggccttttctgtttactcaaccgttacttcaggcttactcttggtgtttatgactacttggtctctacacaagaatttaggtatatgaactcccaggggcttttgcctcctaagagtagtattgatgctttcaagcttaacattaagttgttgggtattggaggtaaaccatgtatcaaggttgctactgtacagtctaaaatgtctgacgtaaagtgcacatctgtggtactgctctcggttcttcaacaacttagagtagagtcatcttctaaattgtgggcacaatgtgtacaactccacaatgatattcttcttgcaaaagacacaactgaagctttcgagaagatggtttctcttttgtctgttttgctatccatgcagggtgctgtagacattaataggttgtgcgaggaaatgctcgataaccgtgctactcttcaggctattgcttcagaatttagttctttaccatcatatgccgcttatgccactgcccaggaggcctatgagcaggctgtagctaatggtgattctgaagtcgttctcaaaaagttaaagaaatctttgaatgtggctaaatctgagtttgaccgtgatgctgccatgcaacgcaagttggaaaagatggcagatcaggctatgacccaaatgtacaaacaggcaagatctgaggacaagagggcaaaagtaactagtgctatgcaaacaatgctcttcactatgcttaggaagcttgataatgatgcacttaacaacattatcaacaatgcgcgtgatggttgtgttccactcaacatcataccattgactacagcagccaaactcatggttgttgtccctgattatggtacctacaagaacacttgtgatggtaacacctttacatatgcatctgcactctgggaaatccagcaagttgttgatgcggatagcaagattgttcaacttagtgaaattaacatggacaattcaccaaatttggcttggcctcttattgttacagctctaagagccaactcagctgttaaactacagaataatgaactgagtccagtagcactacgacagatgtcctgtgcggctggtaccacacaaacagcttgtactgatgacaatgcacttgcctactataacaattcgaagggaggtaggtttgtgctggcattactatcagaccaccaagatctcaaatgggctagattccctaagagtgatggtacaggtacaatttacacagaactggaaccaccttgtaggtttgttacagacacaccaaaagggcctaaagtgaaatacttgtacttcatcaaaggcttaaacaacctaaatagaggtatggtgctgggcagtttagctgctacagtacgtcttcaggctggaaatgctacagaagtacctgccaattcaactgtgctttccttctgtgcttttgcagtagaccctgctaaagcatataaggattacctagcaagtggaggacaaccaatcaccaactgtgtgaagatgttgtgtacacacactggtacaggacaggcaattactgtaacaccagaagctaacatggaccaagagtcctttggtggtgcttcatgttgtctgtattgtagatgccacattgaccatccaaatcctaaaggattctgtgacttgaaaggtaagtacgtccaaatacctaccacttgtgctaatgacccagtgggttttacacttagaaacacagtctgtaccgtctgcggaatgtggaaaggttatggctgtagttgtgaccaactccgcgaacccttgatgcagtctgcggatgcatcaacgtttttaaacgggtttgcggtgtaagtgcagcccgtcttacaccgtgcggcacaggcactagtactgatgtcgtctacagggcttttgatatttacaacgaaaaagttgctggttttgcaaagttcctaaaaactaattgctgtcgcttccaggagaaggatgaggaaggcaatttattagactcttactttgtagttaagaggcatactatgtctaactaccaacatgaagagactatttataacttggttaaagattgtccagcggttgctgtccatgactttttcaagtttagagtagatggtgacatggtaccacatatatcacgtcagcgtctaactaaatacacaatggctgatttagtctatgctctacgtcattttgatgagggtaattgtgatacattaaaagaaatactcgtcacatacaattgctgtgatgatgattatttcaataagaaggattggtatgacttcgtagagaatcctgacatcttacgcgtatatgctaacttaggtgagcgtgtacgccaatcattattaaagactgtacaattctgcgatgctatgcgtgatgcaggcattgtaggcgtactgacattagataatcaggatcttaatgggaactggtacgatttcggtgatttcgtacaagtagcaccaggctgcggagttcctattgtggattcatattactcattgctgatgcccatcctcactttgactagggcattggctgctgagtcccatatggatgctgatctcgcaaaaccacttattaagtgggatttgctgaaatatgattttacggaagagagactttgtctcttcgaccgttattttaaatattgggaccagacataccatcccaattgtattaactgtttggatgataggtgtatccttcattgtgcaaactttaatgtgttattttctactgtgtttccacctacaagttttggaccactagtaagaaaaatatttgtagatggtgttccttttgttgtttcaactggataccattttcgtgagttaggagtcgtacataatcaggatgtaaacttacatagctcgcgtctcagtttcaaggaacttttagtgtatgctgctgatccagctatgcatgcagcttctggcaatttattgctagataaacgcactacatgcttttcagtagctgcactaacaaacaatgttgcttttcaaactgtcaaacccggtaattttaataaagacttttatgactttgctgtgtctaaaggtttctttaaggaaggaagttctgttgaactaaaacacttcttctttgctcaggatggcaacgctgctatcagtgattatgactattatcgttataatctgccaacaatgtgtgatatcagacaactcctattcgtagttgaagttgttgataaatactttgattgttacgatggtggctgtattaatgccaaccaagtaatcgttaacaatctggataaatcagctggtttcccatttaataaatggggtaaggctagactttattatgactcaatgagttatgaggatcaagatgcacttttcgcgtatactaagcgtaatgtcatccctactataactcaaatgaatcttaagtatgccattagtgcaaagaatagagctcgcaccgtagctggtgtctctatctgtagtactatgacaaatagacagtttcatcagaaattattgaagtcaatagccgccactagaggagctactgtggtaattggaacaagcaagttttacggtggctggcataatatgttaaaaactgtttacagtgatgtagaaactccacaccttatgggttgggattatccaaaatgtgacagagccatgcctaacatgcttaggataatggcctctcttgttcttgctcgcaaacataacacttgctgtaacttatcacaccgtttctacaggttagctaacgagtgtgcgcaagtattaagtgagatggtcatgtgtggcggctcactatatgttaaaccaggtggaacatcatccggtgatgctacaactgcttatgctaatagtgtctttaacatttgtcaagctgttacagccaatgtaaatgcacttctttcaactgatggtaataagatagctgacaagtatgtccgcaatctacaacacaggctctatgagtgtctctatagaaatagggatgttgatcatgaattcgtggatgagttttacgcttacctgcgtaaacatttctccatgatgattctttctgatgatgccgttgtgtgctataacagtaactatgcggctcaaggtttagtagctagcattaagaactttaaggcagttctttattatcaaaataatgtgttcatgtctgaggcaaaatgttggactgagactgaccttactaaaggacctcacgaattttgctcacagcatacaatgctagttaaacaaggagatgattacgtgtacctgccttacccagatccatcaagaatattaggcgcaggctgttttgtcgatgatattgtcaaaacagatggtacacttatgattgaaaggttcgtgtcactggctattgatgcttacccacttacaaaacatcctaatcaggagtatgctgatgtctttcacttgtatttacaatacattagaaagttacatgatgagcttactggccacatgttggacatgtattccgtaatgctaactaatgataacacctcacggtactgggaacctgagttttatgaggctatgtacacaccacatacagtcttgcaggctgtaggtgcttgtgtattgtgcaattcacagacttcacttcgttgcggtgcctgtattaggagaccattcctatgttgcaagtgctgctatgaccatgtcatttcaacatcacacaaattagtgttgtctgttaatccctatgtttgcaatgccccaggttgtgatgtcactgatgtgacacaactgtatctaggaggtatgagctattattgcaagtcacataagcctcccattagttttccattatgtgctaatggtcaggtttttggtttatacaaaaacacatgtgtaggcagtgacaatgtcactgacttcaatgcgatagcaacatgtgattggactaatgctggcgattacatacttgccaacacttgtactgagagactcaagcttttcgcagcagaaacgctcaaagccactgaggaaacatttaagctgtcatatggtattgccactgtacgcgaagtactctctgacagagaattgcatctttcatgggaggttggaaaacctagaccaccattgaacagaaactatgtctttactggttaccgtgtaactaaaaatagtaaagtacagattggagagtacacctttgaaaaaggtgactatggtgatgctgttgtgtacagaggtactacgacatacaagttgaatgttggtgattactttgtgttgacatctcacactgtaatgccacttagtgcacctactctagtgccacaagagcactatgtgagaattactggcttgtacccaacactcaacatctcagatgagttttctagcaatgttgcaaattatcaaaaggtcggcatgcaaaagtactctacactccaaggaccacctggtactggtaagagtcattttgccatcggacttgctctctattacccatctgctcgcatagtgtatacggcatgctctcatgcagctgttgatgccctatgtgaaaaggcattaaaatatttgcccatagataaatgtagtagaatcatacctgcgcgtgcgcgcgtagagtgttttgataaattcaaagtgaattcaacactagaacagtatgttttctgcactgtaaatgcattgccagaaacaactgctgacattgtagtctttgatgaaatctctatggctactaattatgacttgagtgttgtcaatgctagacttcgtgcaaaacactacgtctatattggcgatcctgctcaattaccagccccccgcacattgctgactaaaggcacactagaaccagaatattttaattcagtgtgcagacttatgaaaacaataggtccagacatgttccttggaacttgtcgccgttgtcctgctgaaattgttgacactgtgagtgctttagtttatgacaataagctaaaagcacacaaggagaagtcagctcaatgcttcaaaatgttctacaaaggtgttattacacatgatgtttcatctgcaatcaacagacctcaaataggcgttgtaagagaatttcttacacgcaatcctgcttggagaaaagctgtttttatctcaccttataattcacagaacgctgtagcttcaaaaatcttaggattgcctacgcagactgttgattcatcacagggttctgaatatgactatgtcatattcacacaaactactgaaacagcacactcttgtaatgtcaaccgtttcaatgtggctatcacaagggcaaaaattggcattttgtgcataatgtctgatagagatctttatgacaaactgcaatttacaagtctagaaataccacgtcgcaatgtggctacattacaagcagaaaatgtaactggactttttaaggactgtagtaagatcattactggtcttcatcctacacaggcacctacacacctcagcgttgatataaagttcaagactgaaggattatgtgttgacataccaggcataccaaaggacatgacctaccgtagactcatctctatgatgggtttcaaaatgaattaccaagtcaatggttaccctaatatgtttatcacccgcgaagaagctattcgtcacgttcgtgcgtggattggctttgatgtagagggctgtcatgcaactagagatgctgtgggtactaacctacctctccagctaggattttctacaggtgttaacttagtagctgtaccgactggttatgttgacactgaaaataacacagaattcaccagagttaatgcaaaacctccaccaggtgaccagtttaaacatcttataccactcatgtataaaggcttgccctggaatgtagtgcgtattaagatagtacaaatgctcagtgatacactgaaaggattgtcagacagagtcgtgttcgtcctttgggcgcatggctttgagcttacatcaatgaagtactttgtcaagattggacctgaaagaacgtgttgtctgtgtgacaaacgtgcaacttgcttttctacttcatcagatacttatgcctgctggaatcattctgtgggttttgactatgtctataacccatttatgattgatgttcagcagtggggctttacgggtaaccttcagagtaaccatgaccaacattgccaggtacatggaaatgcacatgtggctagttgtgatgctatcatgactagatgtttagcagtccatgagtgctttgttaagcgcgttgattggtctgttgaataccctattataggagatgaactgagggttaattctgcttgcagaaaagtacaacacatggttgtgaagtctgcattgcttgctgataagtttccagttcttcatgacattggaaatccaaaggctatcaagtgtgtgcctcaggctgaagtagaatggaagttctacgatgctcagccatgtagtgacaaagcttacaaaatagaggagctcttctattcttatgctacacatcacgataaattcactgatggtgtttgtttgttttggaattgtaacgttgatcgttacccagccaatgcaattgtgtgtaggtttgacacaagagtcttgtcaaacttgaacttaccaggctgtgatggtggtagtttgtatgtgaataagcatgcattccacactccagctttcgataaaagtgcatttactaatttaaagcaattgcctttcttttactattctgatagtccttgtgagtctcatggcaaacaagtagtgtcggatattgattatgttccactcaaatctgctacgtgtattacacgatgcaatttaggtggtgctgtttgcagacaccatgcaaatgagtaccgacagtacttggatgcatataatatgatgatttctgctggatttagcctatggatttacaaacaatttgatacttataacctgtggaatacatttaccaggttacagagtttagaaaatgtggcttataatgttgttaataaaggacactttgatggacacgccggcgaagcacctgtttccatcattaataatgctgtttacacaaaggtagatggtattgatgtggagatctttgaaaataagacaacacttcctgttaatgttgcatttgagctttgggctaagcgtaacattaaaccagtgccagagattaagatactcaataatttgggtgttgatatcgctgctaatactgtaatctgggactacaaaagagaagccccagcacatgtatctacaataggtgtctgcacaatgactgacattgccaagaaacctactgagagtgcttgttcttcacttactgtcttgtttgatggtagagtggaaggacaggtagacctttttagaaacgcccgtaatggtgttttaataacagaaggttcagtcaaaggtctaacaccttcaaagggaccagcacaagctagcgtcaatggagtcacattaattggagaatcagtaaaaacacagtttaactactttaagaaagtagacggcattattcaacagttgcctgaaacctactttactcagagcagagacttagaggattttaagcccagatcacaaatggaaactgactttctcgagctcgctatggatgaattcatacagcgatataagctcgagggctatgccttcgaacacatcgtttatggagatttcagtcatggacaacttggcggtcttcatttaatgataggcttagccaagcgctcacaagattcaccacttaaattagaggattttatccctatggacagcacagtgaaaaattacttcataacagatgcgcaaacaggttcatcaaaatgtgtgtgttctgtgattgatcttttacttgatgactttgtcgagataataaagtcacaagatttgtcagtgatttcaaaagtggtcaaggttacaattgactatgctgaaatttcattcatgctttggtgtaaggatggacatgttgaaaccttctacccaaaactacaagcaagtcaagcgtggcaaccaggtgttgcgatgcctaacttgtacaagatgcaaagaatgcttcttgaaaagtgtgaccttcagaattatggtgaaaatgctgttataccaaaaggaataatgatgaatgtcgcaaagtatactcaactgtgtcaatacttaaatacacttactttagctgtaccctacaacatgagagttattcactttggtgctggctctgataaaggagttgcaccaggtacagctgtgctcagacaatggttgccaactggcacactacttgtcgattcagatcttaatgacttcgtctccgacgcagattctactttaattggagactgtgcaacagtacatacggctaataaatgggaccttattattagcgatatgtatgaccctaggaccaaacatgtgacaaaagagaatgactctaaagaagggtttttcacttatctgtgtggatttataaagcaaaaactagccctgggtggttctatagctgtaaagataacagagcattcttggaatgctgacctttacaagcttatgggccatttctcatggtggacagcttttgttacaaatgtaaatgcatcatcatcggaagcatttttaattggggctaactatcttggcaagccgaaggaacaaattgatggctataccatgcatgctaactacattttctggaggaacacaaatcctatccagttgtcttcctattcactctttgacatgagcaaatttcctcttaaattaagaggaactgctgtaatgtctcttaaggagaatcaaatcaatgatatgatttattctcttctggaaaaaggtaggcttatcattagagaaaacaacagagttgtggtttcaagtgatattcttgttaacaactaaacgaacatgtttattttcttattatttcttactctcactagtggtagtgaccttgaccggtgcaccacttttgatgatgttcaagctcctaattacactcaacatacttcatctatgaggggggtttactatcctgatgaaatttttagatcagacactctttatttaactcaggatttatttcttccattttattctaatgttacagggtttcatactattaatcatacgtttgacaaccctgtcataccttttaaggatggtatttattttgctgccacagagaaatcaaatgttgtccgtggttgggtttttggttctaccatgaacaacaagtcacagtcggtgattattattaacaattctactaatgttgttatacgagcatgtaactttgaattgtgtgacaaccctttctttgctgtttctaaacccatgggtacacagacacatactatgatattcgataatgcatttaattgcactttcgagtacatatctgatgccttttcgcttgatgtttcagaaaagtcaggtaattttaaacacttacgagagtttgtgtttaaaaataaagatgggtttctctatgtttataagggctatcaacctatagatgtagttcgtgatctaccttctggttttaacactttgaaacctatttttaagttgcctcttggtattaacattacaaattttagagccattcttacagccttttcacctgctcaagacacttggggcacgtcagctgcagcctattttgttggctatttaaagccaactacatttatgctcaagtatgatgaaaatggtacaatcacagatgctgttgattgttctcaaaatccacttgctgaactcaaatgctctgttaagagctttgagattgacaaaggaatttaccagacctctaatttcagggttgttccctcaggagatgttgtgagattccctaatattacaaacttgtgtccttttggagaggtttttaatgctactaaattcccttctgtctatgcatgggagagaaaaaaaatttctaattgtgttgctgattactctgtgctctacaactcaacatttttttcaacctttaagtgctatggcgtttctgccactaagttgaatgatctttgcttctccaatgtctatgcagattcttttgtagtcaagggagatgatgtaagacaaatagcgccaggacaaactggtgttattgctgattataattataaattgccagatgatttcatgggttgtgtccttgcttggaatactaggaacattgatgctacttcaactggtaattataattataaatataggtatcttagacatggcaagcttaggccctttgagagagacatatctaatgtgcctttctcccctgatggcaaaccttgcaccccacctgctcttaattgttattggccattaaatgattatggtttttacaccactactggcattggctaccaaccttacagagttgtagtactttcttttgaacttttaaatgcaccggccacggtttgtggaccaaaattatccactgaccttattaagaaccagtgtgtcaattttaattttaatggactcactggtactggtgtgttaactccttcttcaaagagatttcaaccatttcaacaatttggccgtgatgtttctgatttcactgattccgttcgagatcctaaaacatctgaaatattagacatttcaccttgctcttttgggggtgtaagtgtaattacacctggaacaaatgcttcatctgaagttgctgttctatatcaagatgttaactgcactgatgtttctacagcaattcatgcagatcaactcacaccagcttggcgcatatattctactggaaacaatgtattccagactcaagcaggctgtcttataggagctgagcatgtcgacacttcttatgagtgcgacattcctattggagctggcatttgtgctagttaccatacagtttctttattacgtagtactagccaaaaatctattgtggcttatactatgtctttaggtgctgatagttcaattgcttactctaataacaccattgctatacctactaacttttcaattagcattactacagaagtaatgcctgtttctatggctaaaacctccgtagattgtaatatgtacatctgcggagattctactgaatgtgctaatttgcttctccaatatggtagcttttgcacacaactaaatcgtgcactctcaggtattgctgctgaacaggatcgcaacacacgtgaagtgttcgctcaagtcaaacaaatgtacaaaaccccaactttgaaatattttggtggttttaatttttcacaaatattacctgaccctctaaagccaactaagaggtcttttattgaggacttgctctttaataaggtgacactcgctgatgctggcttcatgaagcaatatggcgaatgcctaggtgatattaatgctagagatctcatttgtgcgcagaagttcaatggacttacagtgttgccacctctgctcactgatgatatgattgctgcctacactgctgctctagttagtggtactgccactgctggatggacatttggtgctggcgctgctcttcaaataccttttgctatgcaaatggcatataggttcaatggcattggagttacccaaaatgttctctatgagaaccaaaaacaaatcgccaaccaatttaacaaggcgattagtcaaattcaagaatcacttacaacaacatcaactgcattgggcaagctgcaagacgttgttaaccagaatgctcaagcattaaacacacttgttaaacaacttagctctaattttggtgcaatttcaagtgtgctaaatgatatcctttcgcgacttgataaagtcgaggcggaggtacaaattgacaggttaattacaggcagacttcaaagccttcaaacctatgtaacacaacaactaatcagggctgctgaaatcagggcttctgctaatcttgctgctactaaaatgtctgagtgtgttcttggacaatcaaaaagagttgacttttgtggaaagggctaccaccttatgtccttcccacaagcagccccgcatggtgttgtcttcctacatgtcacgtatgtgccatcccaggagaggaacttcaccacagcgccagcaatttgtcatgaaggcaaagcatacttccctcgtgaaggtgtttttgtgtttaatggcacttcttggtttattacacagaggaacttcttttctccacaaataattactacagacaatacatttgtctcaggaaattgtgatgtcgttattggcatcattaacaacacagtttatgatcctctgcaacctgagcttgactcattcaaagaagagctggacaagtacttcaaaaatcatacatcaccagatgttgatcttggcgacatttcaggcattaacgcttctgtcgtcaacattcaaaaagaaattgaccgcctcaatgaggtcgctaaaaatttaaatgaatcactcattgaccttcaagaattgggaaaatatgagcaatatattaaatggccttggtatgtttggctcggcttcattgctggactaattgccatcgtcatggttacaatcttgctttgttgcatgactagttgttgcagttgcctcaagggtgcatgctcttgtggttcttgctgcaagtttgatgaggatgactctgagccagttctcaagggtgtcaaattacattacacataaacgaacttatggatttgtttatgagattttttactcttggatcaattactgcacagccagtaaaaattgacaatgcttctcctgcaagtactgttcatgctacagcaacgataccgctacaagcctcactccctttcggatggcttgttattggcgttgcatttcttgctgtttttcagagcgctaccaaaataattgcgctcaataaaagatggcagctagccctttataagggcttccagttcatttgcaatttactgctgctatttgttaccatctattcacatcttttgcttgtcgctgcaggtatggaggcgcaatttttgtacctctatgccttgatatattttctacaatgcatcaacgcatgtagaattattatgagatgttggctttgttggaagtgcaaatccaagaacccattactttatgatgccaactactttgtttgctggcacacacataactatgactactgtataccatataacagtgtcacagatacaattgtcgttactgaaggtgacggcatttcaacaccaaaactcaaagaagactaccaaattggtggttattctgaggataggcactcaggtgttaaagactatgtcgttgtacatggctatttcaccgaagtttactaccagcttgagtctacacaaattactacagacactggtattgaaaatgctacattcttcatctttaacaagcttgttaaagacccaccgaatgtgcaaatacacacaatcgacggctcttcaggagttgctaatccagcaatggatccaatttatgatgagccgacgacgactactagcgtgcctttgtaagcacaagaaagtgagtacgaacttatgtactcattcgtttcggaagaaacaggtacgttaatagttaatagcgtacttctttttcttgctttcgtggtattcttgctagtcacactagccatccttactgcgcttcgattgtgtgcgtactgctgcaatattgttaacgtgagtttagtaaaaccaacggtttacgtctactcgcgtgttaaaaatctgaactcttctgaaggagttcctgatcttctggtctaaacgaactaactattattattattctgtttggaactttaacattgcttatcatggcagacaacggtactattaccgttgaggagcttaaacaactcctggaacaatggaacctagtaataggtttcctattcctagcctggattatgttactacaatttgcctattctaatcggaacaggtttttgtacataataaagcttgttttcctctggctcttgtggccagtaacacttgcttgttttgtgcttgctgctgtctacagaattaattgggtgactggcgggattgcgattgcaatggcttgtattgtaggcttgatgtggcttagctacttcgttgcttccttcaggctgtttgctcgtacccgctcaatgtggtcattcaacccagaaacaaacattcttctcaatgtgcctctccgggggacaattgtgaccagaccgctcatggaaagtgaacttgtcattggtgctgtgatcattcgtggtcacttgcgaatggccggacactccctagggcgctgtgacattaaggacctgccaaaagagatcactgtggctacatcacgaacgctttcttattacaaattaggagcgtcgcagcgtgtaggcactgattcaggttttgctgcatacaaccgctaccgtattggaaactataaattaaatacagaccacgccggtagcaacgacaatattgctttgctagtacagtaagtgacaacagatgtttcatcttgttgacttccaggttacaatagcagagatattgattatcattatgaggactttcaggattgctatttggaatcttgacgttataataagttcaatagtgagacaattatttaagcctctaactaagaagaattattcggagttagatgatgaagaacctatggagttagattatccataaaacgaacatgaaaattattctcttcctgacattgattgtatttacatcttgcgagctatatcactatcaggagtgtgttagaggtacgactgtactactaaaagaaccttgcccatcaggaacatacgagggcaattcaccatttcaccctcttgctgacaataaatttgcactaacttgcactagcacacactttgcttttgcttgtgctgacggtactcgacatacctatcagctgcgtgcaagatcagtttcaccaaaacttttcatcagacaagaggaggttcaacaagagctctactcgccactttttctcattgttgctgctctagtatttttaatactttgcttcaccattaagagaaagacagaatgaatgagctcactttaattgacttctatttgtgctttttagcctttctgctattccttgttttaataatgcttattatattttggttttcactcgaaatccaggatctagaagaaccttgtaccaaagtctaaacgaacatgaaacttctcattgttttgacttgtatttctctatgcagttgcatacgcactgtagtacagcgctgtgcatctaataaacctcatgtgcttgaagatccttgtaaggtacaacactaggggtaatacttatagcactgcttggctttgtgctctaggaaaggttttaccttttcatagatggcacactatggttcaaacatgcacacctaatgttactatcaactgtcaagatccagctggtggtgcgcttatagctaggtgttggtaccttcatgaaggtcaccaaactgctgcatttagagacgtacttgttgttttaaataaacgaacaaattaaaatgtctgataatggaccccaatcaaaccaacgtagtgccccccgcattacatttggtggacccacagattcaactgacaataaccagaatggaggacgcaatggggcaaggccaaaacagcgccgaccccaaggtttacccaataatactgcgtcttggttcacagctctcactcagcatggcaaggaggaacttagattccctcgaggccagggcgttccaatcaacaccaatagtggtccagatgaccaaattggctactaccgaagagctacccgacgagttcgtggtggtgacggcaaaatgaaagagctcagccccagatggtacttctattacctaggaactggcccagaagcttcacttccctacggcgctaacaaagaaggcatcgtatgggttgcaactgagggagccttgaatacacccaaagaccacattggcacccgcaatcctaataacaatgctgccaccgtgctacaacttcctcaaggaacaacattgccaaaaggcttctacgcagagggaagcagaggcggcagtcaagcctcttctcgctcctcatcacgtagtcgcggtaattcaagaaattcaactcctggcagcagtaggggaaattctcctgctcgaatggctagcggaggtggtgaaactgccctcgcgctattgctgctagacagattgaaccagcttgagagcaaagtttctggtaaaggccaacaacaacaaggccaaactgtcactaagaaatctgctgctgaggcatctaaaaagcctcgccaaaaacgtactgccacaaaacagtacaacgtcactcaagcatttgggagacgtggtccagaacaaacccaaggaaatttcggggaccaagacctaatcagacaaggaactgattacaaacattggccgcaaattgcacaatttgctccaagtgcctctgcattctttggaatgtcacgcattggcatggaagtcacaccttcgggaacatggctgacttatcatggagccattaaattggatgacaaagatccacaattcaaagacaacgtcatactgctgaacaagcacattgacgcatacaaaacattcccaccaacagagcctaaaaaggacaaaaagaaaaagactgatgaagctcagcctttgccgcagagacaaaagaagcagcccactgtgactcttcttcctgcggctgacatggatgatttctccagacaacttcaaaattccatgagtggagcttctgctgattcaactcaggcataaacactcatgatgaccacacaaggcagatgggctatgtaaacgttttcgcaattccgtttacgatacatagtctactcttgtgcagaatgaattctcgtaactaaacagcacaagtaggtttagttaactttaatctcacatagcaatctttaatcaatgtgtaacattagggaggacttgaaagagccaccacattttcatcgaggccacgcggagtacgatcgagggtacagtgaataatgctagggagagctgcctatatggaagagccctaatgtgtaaaattaattttagtagtgctatccccatgtgattttaatagcttcttaggagaatgacaaaaaaaaaaaaaaaaaaaaaaaa

SEQ ID NO: 56 - DNA, 29206 bp, Coronavirus
aaagccaaccaacctcgatctcttgtagatctgttctctaaacgaactttaaaatctgtgtagctgtcgctcggctgcatgcctagtgcacctacgcagtataaacaataataaattttactgtcgttgacaagaaacgagtaactcgtccctcttctgcagactgcttacggtttcgtccgtgttgcagtcgatcatcagcatacctaggtttcgtccgggtgtgaccgaaaggtaagatggagagccttgttcttggtgtcaacgagaaaacacacgtccaactcagtttgcctgtccttcaggttagagacgtgctagtgcgtggcttcggggactctgtggaagaggccctatcggaggcacgtgaacacctcaaaaatggcacttgtggtctagtagagctggaaaaaggcgtactgccccagcttgaacagccctatgtgttcattaaacgttctgatgccttaagcaccaatcacggccacaaggtcgttgagctggttgcagaaatggacggcattcagtacggtcgtagcggtataacactgggagtactcgtgccacatgtgggcgaaaccccaattgcataccgcaatgttcttcttcgtaagaacggtaataagggagccggtggtcatagctatggcatcgatctaaagtcttatgacttaggtgacgagcttggcactgatcccattgaagattatgaacaaaactggaacactaagcatggcagtggtgcactccgtgaactcactcgtgagctcaatggaggtgcagtcactcgctatgtcgacaacaatttctgtggcccagatgggtaccctcttgattgcatcaaagattttctcgcacgcgcgggcaagtcaatgtgcactctttccgaacaacttgattacatcgagtcgaagagaggtgtctactgctgccgtgaccatgagcatgaaattgcctggttcactgagcgctctgataagagctacgagcaccagacacccttcgaaattaagagtgccaagaaatttgacactttcaaaggggaatgcccaaagtttgtgtttcctcttaactcaaaagtcaaagtcattcaaccacgtgttgaaaagaaaaagactgagggtttcatggggcgtatacgctctgtgtaccctgttgcatctccacaggagtgtaacaatatgcacttgtctaccttgatgaaatgtaatcattgcgatgaagtttcatggcagacgtgcgactttctgaaagccacttgtgaacattgtggcactgaaaatttagttattgaaggacctactacatgtgggtacctacctactaatgctgtagtgaaaatgccatgtcctgcctgtcaagacccagagattggacctgagcatagtgttgcagattatcacaaccactcaaacattgaaactcgactccgcaagggaggtaggactagatgttttggaggctgtgtgtttgcctatgttggctgctataataagcgtgcctactgggttcctcgtgctagtgctgatattggctcaggccatactggcattactggtgacaatgtggagaccttgaatgaggatctccttgagatactgagtcgtgaacgtgttaacattaacattgttggcgattttcatttgaatgaagaggttgccatcattttggcatctttctctgcttctacaagtgcctttattgacactataaagagtcttgattacaagtctttcaaaaccattgttgagtcctgcggtaactataaagttaccaagggaaagcccgtaaaaggtgcttggaacattggacaacagagatcagttttaacaccactgtgtggttttccctcacaggctgctggtgttatcagatcaatttttgcgcgcacacttgatgcagcaaaccactcaattcctgatttgcaaagagcagctgtcaccatacttgatggtatttctgaacagtcattacgtcttgtcgacgccatggtttatacttcagacctgctcaccaacagtgtcattattatggcatatgtaactggtggtcttgtacaacagacttctcagtggttgtctaatcttttgggcactactgttgaaaaactcaggcctatctttgaatggattgaggcgaaacttagtgcaggagttgaatttctcaaggatgcttgggagattctcaaatttctcattacaggtgtttttgacatcgtcaagggtcaaatacaggttgcttcagataacatcaaggattgtgtaaaatgcttcattgatgttgttaacaaggcactcgaaatgtgcattgatcaagtcactatcgctggcgcaaagttgcgatcactcaacttaggtgaagtcttcatcgctcaaagcaagggactttaccgtcagtgtatacgtggcaaggagcagctgcaactactcatgcctcttaaggcaccaaaagaagtaacctttcttgaaggtgattcacatgacacagtacttacctctgaggaggttgttctcaagaacggtgaactcgaagcactcgagacgcccgttgatagcttcacaaatggagctatcgttggcacaccagtctgtgtaaatggcctcatgctcttagagattaaggacaaagaacaatactgcgcattgtctcctggtttactggctacaaacaatgtctttcgcttaaaagggggtgcaccaattaaaggtgtaacctttggagaagatactgtttgggaagttcaaggttacaagaatgtgagaatcacatttgagcttgatgaacgtgttgacaaagtgcttaatgaaaagtgctctgtctacactgttgaatccggtaccgaagttactgagtttgcatgtgttgtagcagaggctgttgtgaagactttacaaccagtttctgatctccttaccaacatgggtattgatcttgatgagtggagtgtagctacattctacttatttgatgatgctggtgaagaaaacttttcatcacgtatgtattgttccttttaccctccagatgaggaagaagaggacgatgcagagtgtgaggaagaagaaattgatgaaacctgtgaacatgagtacggtacagaggatgattatcaaggtctccctctggaatttggtgcctcagctgaaacagttcgagttgaggaagaagaagaggaagactggctggatgatactactgagcaatcagagattgagccagaaccagaacctacacctgaagaaccagttaatcagtttactggttatttaaaacttactgacaatgttgccattaaatgtgttgacatcgttaaggaggcacaaagtgctaatcctatggtgattgtaaatgctgctaacatacacctgaaacatggtggtggtgtagcaggtgcactcaacaaggcaaccaatggtgccatgcaaaaggagagtgatgattacattaagctaaatggccctcttacagtaggagggtcttgtttgctttctggacataatcttgctaagaagtgtctgcatgttgttggacctaacctaaatgcaggtgaggacatccagcttcttaaggcagcatatgaaaatttcaattcacaggacatcttacttgcaccattgttgtcagcaggcatatttggtgctaaaccacttcagtctttacaagtgtgcgtgcagacggttcgtacacaggtttatattgcagtcaatgacaaagctctttatgagcaggttgtcatggattatcttgataacctgaagcctagagtggaagcacctaaacaagaggagccaccaaacacagaagattccaaaactgaggagaaatctgtcgtacagaagcctgtcgatgtgaagccaaaaattaaggcctgcattgatgaggttaccacaacactggaagaaactaagtttcttaccaataagttactcttgtttgctgatatcaatggtaagctttaccatgattctcagaacatgcttagaggtgaagatatgtctttccttgagaaggatgcaccttacatggtaggtgatgttatcactagtggtgatatcacttgtgttgtaataccctccaaaaaggctggtggcactactgagatgctctcaagagctttgaagaaagtgccagttgatgagtatataaccacgtaccctggacaaggatgtgctggttatacacttgaggaagctaagactgctcttaagaaatgcaaatctgcattttatgtactaccttcagaagcacctaatgctaaggaagagattctaggaactgtatcctggaatttgagagaaatgcttgctcatgctgaagagacaagaaaattaatgcctatatgcatggatgttagagccataatggcaaccatccaacgtaagtataaaggaattaaaattcaagagggcatcgttgactatggtgtccgattcttcttttatactagtaaagagcctgtagcttctattattacgaagctgaactctctaaatgagccgcttgtcacaatgccaattggttatgtgacacatggttttaatcttgaagaggctgcgcgctgtatgcgttctcttaaagctcctgccgtagtgtcagtatcatcaccagatgctgttactacatataatggatacctcacttcgtcatcaaagacatctgaggagcactttgtagaaacagtttctttggctggctcttacagagattggtcctattcaggacagcgtacagagttaggtgttgaatttcttaagcgtggtgacaaaattgtgtaccacactctggagagccccgtcgagtttcatcttgacggtgaggttctttcacttgacaaactaaagagtctcttatccctgcgggaggttaagactataaaagtgttcacaactgtggacaacactaatctccacacacagcttgtggatatgtctatgacatatggacagcagtttggtccaacatacttggatggtgctgatgttacaaaaattaaacctcatgtaaatcatgagggtaagactttctttgtactacctagtgatgacacactacgtagtgaagctttcgagtactaccatactcttgatgagagttttcttggtaggtacatgtctgctttaaaccacacaaagaaatggaaatttcctcaagttggtggtttaacttcaattaaatgggctgataacaattgttatttgtctagtgttttattagcacttcaacagcttgaagtcaaattcaatgcaccagcacttcaagaggcttattatagagcccgtgctggtgatgctgctaacttttgtgcactcatactcgcttacagtaataaaactgttggcgagcttggtgatgtcagagaaactatgacccatcttctacagcatgctaatttggaatctgcaaagcgagttcttaatgtggtgtgtaaacattgtggtcagaaaactactaccttaacgggtgtagaagctgtgatgtatatgggtactctatcttatgataatcttaagacaggtgtttccattccatgtgtgtgtggtcgtgatgctacacaatatctagtacaacaagagtcttcttttgttatgatgtctgcaccacctgctgagtataaattacagcaaggtacattcttatgtgcgaatgagtacactggtaactatcagtgtggtcattacactcatataactgctaaggagaccctctatcgtattgacggagctcaccttacaaagatgtcagagtacaaaggaccagtgactgatgttttctacaaggaaacatcttacactacaaccatcaagcctgtgtcgtataaactcgatggagttacttacacagagattgaaccaaaattggatgggtattataaaaaggataatgcttactatacagagcagcctatagaccttgtaccaactcaaccattaccaaatgcgagttttgataatttcaaactcacatgttctaacacaaaatttgctgatgatttaaatcaaatgacaggcttcacaaagccagcttcacgagagctatctgtcacattcttcccagacttgaatggcgatgtagtggctattgactatagacactattcagcgagtttcaagaaaggtgctaaattactgcataagccaattgtttggcacattaaccaggctacaaccaagacaacgttcaaaccaaacacttggtgtttacgttgtctttggagtacaaagccagtagatacttcaaattcatttgaagttctggcagtagaagacacacaaggaatggacaatcttgcttgtgaaagtcaacaacccacctctgaagaagtagtggaaaatcctaccatacagaaggaagtcatagagtgtgacgtgaaaactaccgaagttgtaggcaatgtcatacttaaaccatcagatgaaggtgttaaagtaacacaagagttaggtcatgaggatcttatggctgcttatgtggaaaacacaagcattaccattaagaaacctaatgagctttcactagccttaggtttaaaaacaattgccactcatggtattgctgcaattaatagtgttccttggagtaaaattttggcttatgtcaaaccattcttaggacaagcagcaattacaacatcaaattgcgctaagagattagcacaacgtgtgtttaacaattatatgccttatgtgtttacattattgttccaattgtgtacttttactaaaagtaccaattctagaattagagcttcactacctacaactattgctaaaaatagtgttaagagtgttgctaaattatgtttggatgccggcattaattatgtgaagtcacccaaattttctaaattgttcacaatcgctatgtggctattgttgttaagtatttgcttaggttctctaatctgtgtaactgctgcttttggtgtactcttatctaattttggtgctccttcttattgtaatggcgttagagaattgtatcttaattcgtctaacgttactactatggatttctgtgaaggttcttttccttgcagcatttgtttaagtggattagactcccttgattcttatccagctcttgaaaccattcaggtgacgatttcatcgtacaagctagacttgacaattttaggtctggccgctgagtgggttttggcatatatgttgttcacaaaattcttttatttattaggtctttcagctataatgcaggtgttctttggctattttgctagtcatttcatcagcaattcttggctcatgtggtttatcattagtattgtacaaatggcacccgtttctgcaatggttaggatgtacatcttctttgcttctttctactacatatggaagagctatgttcatatcatggatggttgcacctcttcgacttgcatgatgtgctataagcgcaatcgtgccacacgcgttgagtgtacaactattgttaatggcatgaagagatctttctatgtctatgcaaatggaggccgtggcttctgcaagactcacaattggaattgtctcaattgtgacacattttgcactggtagtacattcattagtgatgaagttgctcgtgatttgtcactccagtttaaaagaccaatcaaccctactgaccagtcatcgtatattgttgatagtgttgctgtgaaaaatggcgcgcttcacctctactttgacaaggctggtcaaaagacctatgagagacatcctctctcccattttgtcaatttagacaatttgagagctaacaacactaaaggttcactgcctattaatgtcatagtttttgatggcaagtccaaatgcgacgagtctgcttctaagtctgcttctgtgtactacagtcagctgatgtgccaacctattctgttgcttgaccaagctcttgtatcagacgttggagatagtactgaagtttccgttaagatgtttgatgcttatgtcgacaccttttcagcaacttttagtgttcctatggaaaaacttaaggcacttgttgctacagctcacagcgagttagcaaagggtgtagctttagatggtgtcctttctacattcgtgtcagctgcccgacaaggtgttgttgataccgatgttgacacaaaggatgttattgaatgtctcaaactttcacatcactctgacttagaagtgacaggtgacagttgtaacaatttcatgctcacctataataaggttgaaaacatgacgcccagagatcttggcgcatgtattgactgtaatgcaaggcatatcaatgcccaagtagcaaaaagtcacaatgtttcactcatctggaatgtaaaagactacatgtctttatctgaacagctgcgtaaacaaattcgtagtgctgccaagaagaacaacataccttttagactaacttgtgctacaactagacaggttgtcaatgtcataactactaaaatctcactcaagggtggtaagattgttagtacttgttttaaacttatgcttaaggccacattattgtgcgttcttgctgcattggtttgttatatcgttatgccagtacatacattgtcaatccatgatggttacacaaatgaaatcattggttacaaagccattcaggatggtgtcactcgtgacatcatttctactgatgattgttttgcaaataaacatgctggttttgacgcatggtttagccagcgtggtggttcatacaaaaatgacaaaagctgccctgtagtagctgctatcattacaagagagattggtttcatagtgcctggcttaccgggtactgtgctgagagcaatcaatggtgacttcttgcattttctacctcgtgtttttagtgctgttggcaacatttgctacacaccttccaaactcattgagtatagtgattttgctacctctgcttgcgttcttgctgctgagtgtacaatttttaaggatgctatgggcaaacctgtgccatattgttatgacactaatttgctagagggttctatttcttatagtgagcttcgtccagacactcgttatgtgcttatggatggttccatcatacagtttcctaacacttacctggagggttctgttagagtagtaacaacttttgatgctgagtactgtagacatggtacatgcgaaaggtcagaagtaggtatttgcctatctaccagtggtagatgggttcttaataatgagcattacagagctctatcaggagttttctgtggtgttgatgcgatgaatctcatagctaacatctttactcctcttgtgcaacctgtgggtgctttagatgtgtctgcttcagtagtggctggtggtattattgccatattggtgacttgtgctgcctactactttatgaaattcagacgtgcttttggtgagtacaaccatgttgttgctgctaatgcacttttgtttttgatgtctttcactatactctgtctggcaccagcttacagctttctgccgggagtctactcagtcttttacttgtacttgacattctatttcaccaatgatgtttcattcttggctcaccttcaatggtttgccatgttttctcctattgtgcctttttggataacagcaatctatgtattctgtatttctctgaagcactgccattggttctttaacaactatcttaggaaaagagtcatgtttaatggagttacatttagtaccttcgaggaggctgctttgtgtacctttttgctcaacaaggaaatgtacctaaaattgcgtagcgagacactgttgccacttacacagtataacaggtatcttgctctatataacaagtacaagtatttcagtggagccttagatactaccagctatcgtgaagcagcttgctgccacttagcaaaggctctaaatgactttagcaactcaggtgctgatgttctctaccaaccaccacagacatcaatcacttctgctgttctgcagagtggttttaggaaaatggcattcccgtcaggcaaagttgaagggtgcatggtacaagtaacctgtggaactacaactcttaatggattgtggttggatgacacagtatactgtccaagacatgtcatttgcacagcagaagacatgcttaatcctaactatgaagatctgctcattcgcaaatccaaccatagctttcttgttcaggctggcaatgttcaacttcgtgttattggccattctatgcaaaattgtctgcttaggcttaaagttgatacttctaaccctaagacacccaagtataaatttgtccgtatccaacctggtcaaacattttcagttctagcatgctacaatggttcaccatctggtgtttatcagtgtgccatgagacctaatcataccattaaaggttctttccttaatggatcatgtggtagtgttggttttaacattgattatgattgcgtgtctttctgctatatgcatcatatggagcttccaacaggagtacacgctggtactgacttagaaggtaaattctatggtccatttgttgacagacaaactgcacaggctgcaggtacagacacaaccataacattaaatgttttggcatggctgtatgctgctgttatcaatggtgataggtggtttcttaatagattcaccactactttgaatgactttaaccttgtggcaatgaagtacaactatgaacctttgacacaagatcatgttgacatattgggacctctttctgctcaaacaggaattgccgtcttagatatgtgtgctgctttgaaagagctgctgcagaatggtatgaatggtcgtactatccttggtagcactattttagaagatgagtttacaccatttgatgttgttagacaatgctctggtgttaccttccaaggtaagttcaagaaaattgttaagggcactcatcattggatgcttttaactttcttgacatcactattgattcttgttcaaagtacacagtggtcactgtttttctttgtttacgagaatgctttcttgccatttactcttggtattatggcaattgctgcatgtgctatgctgcttgttaagcataagcacgcattcttgtgcttgtttctgttaccttctcttgcaacagttgcttactttaatatggtctacatgcctgctagctgggtgatgcgtatcatgacatggcttgaattggctgacactagcttgtctggttataggcttaaggattgtgttatgtatgcttcagctttagttttgcttattctcatgacagctcgcactgtttatgatgatgctgctagacgtgtttggacactgatgaatgtcattacacttgtttacaaagtctactatggtaatgctttagatcaagctatttccatgtgggccttagttatttctgtaacctctaactattctggtgtcgttacgactatcatgtttttagctagagctatagtgtttgtgtgtgttgagtattacccattgttatttattactggcaacaccttacagtgtatcatgcttgtttattgtttcttaggctattgttgctgctgctactttggccttttctgtttactcaaccgttacttcaggcttactcttggtgtttatgactacttggtctctacacaagaatttaggtatatgaactcccaggggcttttgcctcctaagagtagtattgatgctttcaagcttaacattaagttgttgggtattggaggtaaaccatgtatcaaggttgctactgtacagtctaaaatgtctgacgtaaagtgcacatctgtggtactgctctcggttcttcaacaacttagagtagagtcatcttctaaattgtgggcacaatgtgtacaactccacaatgatattcttcttgcaaaagacacaactgaagctttcgagaagatggtttctcttttgtctgttttgctatccatgcagggtgctgtagacattaataggttgtgcgaggaaatgctcgataaccgtgctactcttcaggctattgcttcagaatttagttctttaccatcatatgccgcttatgccactgcccaggaggcctatgagcaggctgtagctaatggtgattctgaagtcgttctcaaaaagttaaagaaatctttgaatgtggctaaatctgagtttgaccgtgatgctgccatgcaacgcaagttggaaaagatggcagatcaggctatgacccaaatgtacaaacaggcaagatctgaggacaagagggcaaaagtaactagtgctatgcaaacaatgctcttcactatgcttaggaagcttgataatgatgcacttaacaacattatcaacaatgcgcgtgatggttgtgttccactcaacatcataccattgactacagcagccaaactcatggttgttgtccctgattatggtacctacaagaacacttgtgatggtaacacctttacatatgcatctgcactctgggaaatccagcaagttgttgatgcggatagcaagattgttcaacttagtgaaattaacatggacaattcaccaaatttggcttggcctcttattgttacagctctaagagccaactcagctgttaaactacagaataatgaactgagtccagtagcactacgacagatgtcctgtgcggctggtaccacacaaacagcttgtactgatgacaatgcacttgcctactataacaattcgaagggaggtaggtttgtgctggcattactatcagaccaccaagatctcaaatgggctagattccctaagagtgatggtacaggtacaatttacacagaactggaaccaccttgtaggtttgttacagacacaccaaaagggcctaaagtgaaatacttgtacttcatcaaaggcttaaacaacctaaatagaggtatggtgctgggcagtttagctgctacagtacgtcttcaggctggaaatgctacagaagtacctgccaattcaactgtgctttccttctgtgcttttgcagtagaccctgctaaagcatataaggattacctagcaagtggaggacaaccaatcaccaactgtgtgaagatgttgtgtacacacactggtacaggacaggcaattactgtaacaccagaagctaacatggaccaagagtcctttggtggtgcttcatgttgtctgtattgtagatgccacattgaccatccaaatcctaaaggattctgtgacttgaaaggtaagtacgtccaaatacctaccacttgtgctaatgacccagtgggttttacacttagaaacacagtctgtaccgtctgcggaatgtggaaaggttatggctgtagttgtgaccaactccgcgaacccttgatgcagtctgcggatgcatcaacgtttttaaacgggtttgcggtgtaagtgcagcccgtcttacaccgtgcggcacaggcactagtactgatgtcgtctacagggcttttgatatttacaacgaaaaagttgctggttttgcaaagttcctaaaaactaattgctgtcgcttccaggagaaggatgaggaaggcaatttattagactcttactttgtagttaagaggcatactatgtctaactaccaacatgaagagactatttataacttggttaaagattgtccagcggttgctgtccatgactttttcaagtttagagtagatggtgacatggtaccacatatatcacgtcagcgtctaactaaatacacaatggctgatttagtctatgctctacgtcattttgatgagggtaattgtgatacattaaaagaaatactcgtcacatacaattgctgtgatgatgattatttcaataagaaggattggtatgacttcgtagagaatcctgacatcttacgcgtatatgctaacttaggtgagcgtgtacgccaatcattattaaagactgtacaattctgcgatgctatgcgtgatgcaggcattgtaggcgtactgacattagataatcaggatcttaatgggaactggtacgatttcggtgatttcgtacaagtagcaccaggctgcggagttcctattgtggattcatattactcattgctgatgcccatcctcactttgactagggcattggctgctgagtcccatatggatgctgatctcgcaaaaccacttattaagtgggatttgctgaaatatgattttacggaagagagactttgtctcttcgaccgttattttaaatattgggaccagacataccatcccaattgtattaactgtttggatgataggtgtatccttcattgtgcaaactttaatgtgttattttctactgtgtttccacctacaagttttggaccactagtaagaaaaatatttgtagatggtgttccttttgttgtttcaactggataccattttcgtgagttaggagtcgtacataatcaggatgtaaacttacatagctcgcgtctcagtttcaaggaacttttagtgtatgctgctgatccagctatgcatgcagcttctggcaatttattgctagataaacgcactacatgcttttcagtagctgcactaacaaacaatgttgcttttcaaactgtcaaacccggtaattttaataaagacttttatgactttgctgtgtctaaaggtttctttaaggaaggaagttctgttgaactaaaacacttcttctttgctcaggatggcaacgctgctatcagtgattatgactattatcgttataatctgccaacaatgtgtgatatcagacaactcctattcgtagttgaagttgttgataaatactttgattgttacgatggtggctgtattaatgccaaccaagtaatcgttaacaatctggataaatcagctggtttcccatttaataaatggggtaaggctagactttattatgactcaatgagttatgaggatcaagatgcacttttcgcgtatactaagcgtaatgtcatccctactataactcaaatgaatcttaagtatgccattagtgcaaagaatagagctcgcaccgtagctggtgtctctatctgtagtactatgacaaatagacagtttcatcagaaattattgaagtcaatagccgccactagaggagctactgtggtaattggaacaagcaagttttacggtggctggcataatatgttaaaaactgtttacagtgatgtagaaactccacaccttatgggttgggattatccaaaatgtgacagagccatgcctaacatgcttaggataatggcctctcttgttcttgctcgcaaacataacacttgctgtaacttatcacaccgtttctacaggttagctaacgagtgtgcgcaagtattaagtgagatggtcatgtgtggcggctcactatatgttaaaccaggtggaacatcatccggtgatgctacaactgcttatgctaatagtgtctttaacatttgtcaagctgttacagccaatgtaaatgcacttctttcaactgatggtaataagatagctgacaagtatgtccgcaatctacaacacaggctctatgagtgtctctatagaaatagggatgttgatcatgaattcgtggatgagttttacgcttacctgcgtaaacatttctccatgatgattctttctgatgatgccgttgtgtgctataacagtaactatgcggctcaaggtttagtagctagcattaagaactttaaggcagttctttattatcaaaataatgtgttcatgtctgaggcaaaatgttggactgagactgaccttactaaaggacctcacgaattttgctcacagcatacaatgctagttaaacaaggagatgattacgtgtacctgccttacccagatccatcaagaatattaggcgcaggctgttttgtcgatgatattgtcaaaacagatggtacacttatgattgaaaggttcgtgtcactggctattgatgcttacccacttacaaaacatcctaatcaggagtatgctgatgtctttcacttgtatttacaatacattagaaagttacatgatgagcttactggccacatgttggacatgtattccgtaatgctaactaatgataacacctcacggtactgggaacctgagttttatgaggctatgtacacaccacatacagtcttgcaggctgtaggtgcttgtgtattgtgcaattcacagacttcacttcgttgcggtgcctgtattaggagaccattcctatgttgcaagtgctgctatgaccatgtcatttcaacatcacacaaattagtgttgtctgttaatccctatgtttgcaatgccccaggttgtgatgtcactgatgtgacacaactgtatctaggaggtatgagctattattgcaagtcacataagcctcccattagttttccattatgtgctaatggtcaggtttttggtttatacaaaaacacatgtgtaggcagtgacaatgtcactgacttcaatgcgatagcaacatgtgattggactaatgctggcgattacatacttgccaacacttgtactgagagactcaagcttttcgcagcagaaacgctcaaagccactgaggaaacatttaagctgtcatatggtattgccactgtacgcgaagtactctctgacagagaattgcatctttcatgggaggttggaaaacctagaccaccattgaacagaaactatgtctttactggttaccgtgtaactaaaaatagtaaagtacagattggagagtacacctttgaaaaaggtgactatggtgatgctgttgtgtacagaggtactacgacatacaagttgaatgttggtgattactttgtgttgacatctcacactgtaatgccacttagtgcacctactctagtgccacaagagcactatgtgagaattactggcttgtacccaacactcaacatctcagatgagttttctagcaatgttgcaaattatcaaaaggtcggcatgcaaaagtactctacactccaaggaccacctggtactggtaagagtcattttgccatcggacttgctctctattacccatctgctcgcatagtgtatacggcatgctctcatgcagctgttgatgccctatgtgaaaaggcattaaaatatttgcccatagataaatgtagtagaatcatacctgcgcgtgcgcgcgtagagtgttttgataaattcaaagtgaattcaacactagaacagtatgttttctgcactgtaaatgcattgccagaaacaactgctgacattgtagtctttgatgaaatctctatggctactaattatgacttgagtgttgtcaatgctagacttcgtgcaaaacactacgtctatattggcgatcctgctcaattaccagccccccgcacattgctgactaaaggcacactagaaccagaatattttaattcagtgtgcagacttatgaaaacaataggtccagacatgttccttggaacttgtcgccgttgtcctgctgaaattgttgacactgtgagtgctttagtttatgacaataagctaaaagcacacaaggagaagtcagctcaatgcttcaaaatgttctacaaaggtgttattacacatgatgtttcatctgcaatcaacagacctcaaataggcgttgtaagagaatttcttacacgcaatcctgcttggagaaaagctgtttttatctcaccttataattcacagaacgctgtagcttcaaaaatcttaggattgcctacgcagactgttgattcatcacagggttctgaatatgactatgtcatattcacacaaactactgaaacagcacactcttgtaatgtcaaccgtttcaatgtggctatcacaagggcaaaaattggcattttgtgcataatgtctgatagagatctttatgacaaactgcaatttacaagtctagaaataccacgtcgcaatgtggctacattacaagcagaaaatgtaactggactttttaaggactgtagtaagatcattactggtcttcatcctacacaggcacctacacacctcagcgttgatataaagttcaagactgaaggattatgtgttgacataccaggcataccaaaggacatgacctaccgtagactcatctctatgatgggtttcaaaatgaattaccaagtcaatggttaccctaatatgtttatcacccgcgaagaagctattcgtcacgttcgtgcgtggattggctttgatgtagagggctgtcatgcaactagagatgctgtgggtactaacctacctctccagctaggattttctacaggtgttaacttagtagctgtaccgactggttatgttgacactgaaaataacacagaattcaccagagttaatgcaaaacctccaccaggtgaccagtttaaacatcttataccactcatgtataaaggcttgccctggaatgtagtgcgtattaagatagtacaaatgctcagtgatacactgaaaggattgtcagacagagtcgtgttcgtcctttgggcgcatggctttgagcttacatcaatgaagtactttgtcaagattggacctgaaagaacgtgttgtctgtgtgacaaacgtgcaacttgcttttctacttcatcagatacttatgcctgctggaatcattctgtgggttttgactatgtctataacccatttatgattgatgttcagcagtggggctttacgggtaaccttcagagtaaccatgaccaacattgccaggtacatggaaatgcacatgtggctagttgtgatgctatcatgactagatgtttagcagtccatgagtgctttgttaagcgcgttgattggtctgttgaataccctattataggagatgaactgagggttaattctgcttgcagaaaagtacaacacatggttgtgaagtctgcattgcttgctgataagtttccagttcttcatgacattggaaatccaaaggctatcaagtgtgtgcctcaggctgaagtagaatggaagttctacgatgctcagccatgtagtgacaaagcttacaaaatagaggagctcttctattcttatgctacacatcacgataaattcactgatggtgtttgtttgttttggaattgtaacgttgatcgttacccagccaatgcaattgtgtgtaggtttgacacaagagtcttgtcaaacttgaacttaccaggctgtgatggtggtagtttgtatgtgaataagcatgcattccacactccagctttcgataaaagtgcatttactaatttaaagcaattgcctttcttttactattctgatagtccttgtgagtctcatggcaaacaagtagtgtcggatattgattatgttccactcaaatctgctacgtgtattacacgatgcaatttaggtggtgctgtttgcagacaccatgcaaatgagtaccgacagtacttggatgcatataatatgatgatttctgctggatttagcctatggatttacaaacaatttgatacttataacctgtggaatacatttaccaggttacagagtttagaaaatgtggcttataatgttgttaataaaggacactttgatggacacgccggcgaagcacctgtttccatcattaataatgctgtttacacaaaggtagatggtattgatgtggagatctttgaaaataagacaacacttcctgttaatgttgcatttgagctttgggctaagcgtaacattaaaccagtgccagagattaagatactcaataatttgggtgttgatatcgctgctaatactgtaatctgggactacaaaagagaagccccagcacatgtatctacaataggtgtctgcacaatgactgacattgccaagaaacctactgagagtgcttgttcttcacttactgtcttgtttgatggtagagtggaaggacaggtagacctttttagaaacgcccgtaatggtgttttaataacagaaggttcagtcaaaggtctaacaccttcaaagggaccagcacaagctagcgtcaatggagtcacattaattggagaatcagtaaaaacacagtttaactactttaagaaagtagacggcattattcaacagttgcctgaaacctactttactcagagcagagacttagaggattttaagcccagatcacaaatggaaactgactttctcgagctcgctatggatgaattcatacagcgatataagctcgagggctatgccttcgaacacatcgtttatggagatttcagtcatggacaacttggcggtcttcatttaatgataggcttagccaagcgctcacaagattcaccacttaaattagaggattttatccctatggacagcacagtgaaaaattacttcataacagatgcgcaaacaggttcatcaaaatgtgtgtgttctgtgattgatcttttacttgatgactttgtcgagataataaagtcacaagatttgtcagtgatttcaaaagtggtcaaggttacaattgactatgctgaaatttcattcatgctttggtgtaaggatggacatgttgaaaccttctacccaaaactacaagcaagtcaagcgtggcaaccaggtgttgcgatgcctaacttgtacaagatgcaaagaatgcttcttgaaaagtgtgaccttcagaattatggtgaaaatgctgttataccaaaaggaataatgatgaatgtcgcaaagtatactcaactgtgtcaatacttaaatacacttactttagctgtaccctacaacatgagagttattcactttggtgctggctctgataaaggagttgcaccaggtacagctgtgctcagacaatggttgccaactggcacactacttgtcgattcagatcttaatgacttcgtctccgacgcagattctactttaattggagactgtgcaacagtacatacggctaataaatgggaccttattattagcgatatgtatgaccctaggaccaaacatgtgacaaaagagaatgactctaaagaagggtttttcacttatctgtgtggatttataaagcaaaaactagccctgggtggttctatagctgtaaagataacagagcattcttggaatgctgacctttacaagcttatgggccatttctcatggtggacagcttttgttacaaatgtaaatgcatcatcatcggaagcatttttaattggggctaactatcttggcaagccgaaggaacaaattgatggctataccatgcatgctaactacattttctggaggaacacaaatcctatccagttgtcttcctattcactctttgacatgagcaaatttcctcttaaattaagaggaactgctgtaatgtctcttaaggagaatcaaatcaatgatatgatttattctcttctggaaaaaggtaggcttatcattagagaaaacaacagagttgtggtttcaagtgatattcttgttaacaactaaacgaacatgtttattttcttattatttcttactctcactagtggtagtgaccttgaccggtgcaccacttttgatgatgttcaagctcctaattacactcaacatacttcatctatgaggggggtttactatcctgatgaaatttttagatcagacactctttatttaactcaggatttatttcttccattttattctaatgttacagggtttcatactattaatcatacgtttgacaaccctgtcataccttttaaggatggtatttattttgctgccacagagaaatcaaatgttgtccgtggttgggtttttggttctaccatgaacaacaagtcacagtcggtgattattattaacaattctactaatgttgttatacgagcatgtaactttgaattgtgtgacaaccctttctttgctgtttctaaacccatgggtacacagacacatactatgatattcgataatgcatttaattgcactttcgagtacatatctgatgccttttcgcttgatgtttcagaaaagtcaggtaattttaaacacttacgagagtttgtgtttaaaaataaagatgggtttctctatgtttataagggctatcaacctatagatgtagttcgtgatctaccttctggttttaacactttgaaacctatttttaagttgcctcttggtattaacattacaaattttagagccattcttacagccttttcacctgctcaagacacttggggcacgtcagctgcagcctattttgttggctatttaaagccaactacatttatgctcaagtatgatgaaaatggtacaatcacagatgctgttgattgttctcaaaatccacttgctgaactcaaatgctctgttaagagctttgagattgacaaaggaatttaccagacctctaatttcagggttgttccctcaggagatgttgtgagattccctaatattacaaacttgtgtccttttggagaggtttttaatgctactaaattcccttctgtctatgcatgggagagaaaaaaaatttctaattgtgttgctgattactctgtgctctacaactcaacatttttttcaacctttaagtgctatggcgtttctgccactaagttgaatgatctttgcttctccaatgtctatgcagattcttttgtagtcaagggagatgatgtaagacaaatagcgccaggacaaactggtgttattgctgattataattataaattgccagatgatttcatgggttgtgtccttgcttggaatactaggaacattgatgctacttcaactggtaattataattataaatataggtatcttagacatggcaagcttaggccctttgagagagacatatctaatgtgcctttctcccctgatggcaaaccttgcaccccacctgctcttaattgttattggccattaaatgattatggtttttacaccactactggcattggctaccaaccttacagagttgtagtactttcttttgaacttttaaatgcaccggccacggtttgtggaccaaaattatccactgaccttattaagaaccagtgtgtcaattttaattttaatggactcactggtactggtgtgttaactccttcttcaaagagatttcaaccatttcaacaatttggccgtgatgtttctgatttcactgattccgttcgagatcctaaaacatctgaaatattagacatttcaccttgctcttttgggggtgtaagtgtaattacacctggaacaaatgcttcatctgaagttgctgttctatatcaagatgttaactgcactgatgtttctacagcaattcatgcagatcaactcacaccagcttggcgcatatattctactggaaacaatgtattccagactcaagcaggctgtcttataggagctgagcatgtcgacacttcttatgagtgcgacattcctattggagctggcatttgtgctagttaccatacagtttctttattacgtagtactagccaaaaatctattgtggcttatactatgtctttaggtgctgatagttcaattgcttactctaataacaccattgctatacctactaacttttcaattagcattactacagaagtaatgcctgtttctatggctaaaacctccgtagattgtaatatgtacatctgcggagattctactgaatgtgctaatttgcttctccaatatggtagcttttgcacacaactaaatcgtgcactctcaggtattgctgctgaacaggatcgcaacacacgtgaagtgttcgctcaagtcaaacaaatgtacaaaaccccaactttgaaatattttggtggttttaatttttcacaaatattacctgaccctctaaagccaactaagaggtcttttattgaggacttgctctttaataaggtgacactcgctgatgctggcttcatgaagcaatatggcgaatgcctaggtgatattaatgctagagatctcatttgtgcgcagaagttcaatggacttacagtgttgccacctctgctcactgatgatatgattgctgcctacactgctgctctagttagtggtactgccactgctggatggacatttggtgctggcgctgctcttcaaataccttttgctatgcaaatggcatataggttcaatggcattggagttacccaaaatgttctctatgagaaccaaaaacaaatcgccaaccaatttaacaaggcgattagtcaaattcaagaatcacttacaacaacatcaactgcattgggcaagctgcaagacgttgttaaccagaatgctcaagcattaaacacacttgttaaacaacttagctctaattttggtgcaatttcaagtgtgctaaatgatatcctttcgcgacttgataaagtcgaggcggaggtacaaattgacaggttaattacaggcagacttcaaagccttcaaacctatgtaacacaacaactaatcagggctgctgaaatcagggcttctgctaatcttgctgctactaaaatgtctgagtgtgttcttggacaatcaaaaagagttgacttttgtggaaagggctaccaccttatgtccttcccacaagcagccccgcatggtgttgtcttcctacatgtcacgtatgtgccatcccaggagaggaacttcaccacagcgccagcaatttgtcatgaaggcaaagcatacttccctcgtgaaggtgtttttgtgtttaatggcacttcttggtttattacacagaggaacttcttttctccacaaataattactacagacaatacatttgtctcaggaaattgtgatgtcgttattggcatcattaacaacacagtttatgatcctctgcaacctgagcttgactcattcaaagaagagctggacaagtacttcaaaaatcatacatcaccagatgttgatcttggcgacatttcaggcattaacgcttctgtcgtcaacattcaaaaagaaattgaccgcctcaatgaggtcgctaaaaatttaaatgaatcactcattgaccttcaagaattgggaaaatatgagcaatatattaaatggccttggtatgtttggctcggcttcattgctggactaattgccatcgtcatggttacaatcttgctttgttgcatgactagttgttgcagttgcctcaagggtgcatgctcttgtggttcttgctgcaagtttgatgaggatgactctgagccagttctcaagggtgtcaaattacattacacataaacgaacttatggatttgtttatgagattttttactcttggatcaattactgcacagccagtaaaaattgacaatgcttctcctgcaagtactgttcatgctacagcaacgataccgctacaagcctcactccctttcggatggcttgttattggcgttgcatttcttgctgtttttcagagcgctaccaaaataattgcgctcaataaaagatggcagctagccctttataagggcttccagttcatttgcaatttactgctgctatttgttaccatctattcacatcttttgcttgtcgctgcaggtatggaggcgcaatttttgtacctctatgccttgatatattttctacaatgcatcaacgcatgtagaattattatgagatgttggctttgttggaagtgcaaatccaagaacccattactttatgatgccaactactttgtttgctggcacacacataactatgactactgtataccatataacagtgtcacagatacaattgtcgttactgaaggtgacggcatttcaacaccaaaactcaaagaagactaccaaattggtggttattctgaggataggcactcaggtgttaaagactatgtcgttgtacatggctatttcaccgaagtttactaccagcttgagtctacacaaattactacagacactggtattgaaaatgctacattcttcatctttaacaagcttgttaaagacccaccgaatgtgcaaatacacacaatcgacggctcttcaggagttgctaatccagcaatggatccaatttatgatgagccgacgacgactactagcgtgcctttgtaagcacaagaaagtgagtacgaacttatgtactcattcgtttcggaagaaacaggtacgttaatagttaatagcgtacttctttttcttgctttcgtggtattcttgctagtcacactagccatccttactgcgcttcgattgtgtgcgtactgctgcaatattgttaacgtgagtttagtaaaaccaacggtttacgtctactcgcgtgttaaaaatctgaactcttctgaaggagttcctgatcttctggtctaaacgaactaactattattattattctgtttggaactttaacattgcttatcatggcagacaacggtactattaccgttgaggagcttaaacaactcctggaacaatggaacctagtaataggtttcctattcctagcctggattatgttactacaatttgcctattctaatcggaacaggtttttgtacataataaagcttgttttcctctggctcttgtggccagtaacacttgcttgttttgtgcttgctgctgtctacagaattaattgggtgactggcgggattgcgattgcaatggcttgtattgtaggcttgatgtggcttagctacttcgttgcttccttcaggctgtttgctcgtacccgctcaatgtggtcattcaacccagaaacaaacattcttctcaatgtgcctctccgggggacaattgtgaccagaccgctcatggaaagtgaacttgtcattggtgctgtgatcattcgtggtcacttgcgaatggccggacactccctagggcgctgtgacattaaggacctgccaaaagagatcactgtggctacatcacgaacgctttcttattacaaattaggagcgtcgcagcgtgtaggcactgattcaggttttgctgcatacaaccgctaccgtattggaaactataaattaaatacagaccacgccggtagcaacgacaatattgctttgctagtacagtaagtgacaacagatgtttcatcttgttgacttccaggttacaatagcagagatattgattatcattatgaggactttcaggattgctatttggaatcttgacgttataataagttcaatagtgagacaattatttaagcctctaactaagaagaattattcggagttagatgatgaagaacctatggagttagattatccataaaacgaacatgaaaattattctcttcctgacattgattgtatttacatcttgcgagctatatcactatcaggagtgtgttagaggtacgactgtactactaaaagaaccttgcccatcaggaacatacgagggcaattcaccatttcaccctcttgctgacaataaatttgcactaacttgcactagcacacactttgcttttgcttgtgctgacggtactcgacatacctatcagctgcgtgcaagatcagtttcaccaaaacttttcatcagacaagaggaggttcaacaagagctctactcgccactttttctcattgttgctgctctagtatttttaatactttgcttcaccattaagagaaagacagaatgaatgagctcactttaattgacttctatttgtgctttttagcctttctgctattccttgttttaataatgcttattatattttggttttcactcgaaatccaggatctagaagaaccttgtaccaaagtctaaacgaacatgaaacttctcattgttttgacttgtatttctctatgcagttgcatacgcactgtagtacagcgctgtgcatctaataaacctcatgtgcttgaagatccttgtaaggtacaacactaggggtaatacttatagcactgcttggctttgtgctctaggaaaggttttaccttttcatagatggcacactatggttcaaacatgcacacctaatgttactatcaactgtcaagatccagctggtggtgcgcttatagctaggtgttggtaccttcatgaaggtcaccaaactgctgcatttagagacgtacttgttgttttaaataaacgaacaaattaaaatgtctgataatggaccccaatcaaaccaacgtagtgccccccgcattacatttggtggacccacagattcaactgacaataaccagaatggaggacgcaatggggcaaggccaaaacagcgccgaccccaaggtttacccaataatactgcgtcttggttcacagctctcactcagcatggcaaggaggaacttagattccctcgaggccagggcgttccaatcaacaccaatagtggtccagatgaccaaattggctactaccgaagagctacccgacgagttcgtggtggtgacggcaaaatgaaagagctcagccccagatggtacttctattacctaggaactggcccagaagcttcacttccctacggcgctaacaaagaaggcatcgtatgggttgcaactgagggagccttgaatacacccaaagaccacattggcacccgcaatcctaataacaatgctgccaccgtgctacaacttcctcaaggaacaacattgccaaaaggcttctacgcagagggaagcagaggcggcagtcaagcctcttctcgctcctcatcacgtagtcgcggtaattcaagaaattcaactcctggcagcagtaggggaaattctcctgctcgaatggctagcggaggtggtgaaactgccctcgcgctattgctgctagacagattgaaccagcttgagagcaaagtttctggtaaaggccaacaacaacaaggccaaactgtcactaagaaatctgctgctgaggcatctaaaaagcctcgccaaaaacgtactgccacaaaacagtacaacgtcactcaagcatttgggagacgtggtccagaacaaacccaaggaaatttcggggaccaagacctaatcagacaaggaactgattacaaacattggccgcaaattgcacaatttgctccaagtgcctctgcattctttggaatgtcacgcattggcatggaagtcacaccttcgggaacatggctgacttatcatggagccattaaattggatgacaaagatccacaattcaaagacaacgtcatactgctgaacaagcacattgacgcatacaaaacattcccaccaacagagcctaaaaa

SEQ ID NO: 57 - DNA, 29740 bp, Coronavirus
atattaggtttttacctacccaggaaaagccaaccaacctcgatctcttgtagatctgttctctaaacgaactttaaaatctgtgtagctgtcgctcggctgcatgcctagtgcacctacgcagtataaacaataataaattttactgtcgttgacaagaaacgagtaactcgtccctcttctgcagactgcttacggtttcgtccgtgttgcagtcgatcatcagcatacctaggtttcgtccgggtgtgaccgaaaggtaagatggagagccttgttcttggtgtcaacgagaaaacacacgtccaactcagtttgcctgtccttcaggttagagacgtgctagtgcgtggcttcggggactctgtggaagaggccctatcggaggcacgtgaacacctcaaaaatggcacttgtggtctagtagagctggaaaaaggcgtactgccccagcttgaacagccctatgtgttcattaaacgttctgatgccttaagcaccaatcacggccacaaggtcgttgagctggttgcagaaatggacggcattcagtacggtcgtagcggtataacactgggagtactcgtgccacatgtgggcgaaaccccaattgcataccgcaatgttcttcttcgtaagaacggtaataagggagccggtggtcatagctatggcatcgatctaaagtcttatgacttaggtgacgagcttggcactgatcccattgaagattatgaacaaaactggaacactaagcatggcagtggtgcactccgtgaactcactcgtgagctcaatggaggtgcagtcactcgctatgtcgacaacaatttctgtggcccagatgggtaccctcttgattgcatcaaagattttctcgcacgcgcgggcaagtcaatgtgcactctttccgaacaacttgattacatcgagtcgaagagaggtgtctactgctgccgtgaccatgagcatgaaattgcctggttcactgagcgctctgataagagctacgagcaccagacacccttcgaaattaagagtgccaagaaatttgacactttcaaaggggaatgcccaaagtttgtgtttcctcttaactcaaaagtcaaagtcattcaaccacgtgttgaaaagaaaaagactgagggtttcatggggcgtatacgctctgtgtaccctgttgcatctccacaggagtgtaacaatatgcacttgtctaccttgatgaaatgtaatcattgcgatgaagtttcatggcagacgtgcgactttctgaaagccacttgtgaacattgtggcactgaaaatttagttattgaaggacctactacatgtgggtacctacctactaatgctgtagtgaaaatgccatgtcctgcctgtcaagacccagagattggacctgagcatagtgttgcagattatcacaaccactcaaacattgaaactcgactccgcaagggaggtaggactagatgttttggaggctgtgtgtttgcctatgttggctgctataataagcgtgcctactgggttcctcgtgctagtgctgatattggctcaggccatactggcattactggtgacaatgtggagaccttgaatgaggatctccttgagatactgagtcgtgaacgtgttaacattaacattgttggcgattttcatttgaatgaagaggttgccatcattttggcatctttctctgcttctacaagtgcctttattgacactataaagagtcttgattacaagtctttcaaaaccattgttgagtcctgcggtaactataaagttaccaagggaaagcccgtaaaaggtgcttggaacattggacaacagagatcagttttaacaccactgtgtggttttccctcacaggctgctggtgttatcagatcaatttttgcgcgcacacttgatgcagcaaaccactcaattcctgatttgcaaagagcagctgtcaccatacttgatggtatttctgaacagtcattacgtcttgtcgacgccatggtttatacttcagacctgctcaccaacagtgtcattattatggcatatgtaactggtggtcttgtacaacagacttctcagtggttgtctaatcttttgggcactactgttgaaaaactcaggcctatctttgaatggattgaggcgaaacttagtgcaggagttgaatttctcaaggatgcttgggagattctcaaatttctcattacaggtgtttttgacatcgtcaagggtcaaatacaggttgcttcagataacatcaaggattgtgtaaaatgcttcattgatgttgttaacaaggcactcgaaatgtgcattgatcaagtcactatcgctggcgcaaagttgcgatcactcaacttaggtgaagtcttcatcgctcaaagcaagggactttaccgtcagtgtatacgtggcaaggagcagctgcaactactcatgcctcttaaggcaccaaaagaagtaacctttcttgaaggtgattcacatgacacagtacttacctctgaggaggttgttctcaagaacggtgaactcgaaacactcgagacgcccgttgatagcttcacaaatggagctatcgttggcacaccagtctgtgtaaatggcctcatgctcttagagattaaggacaaagaacaatactgcgcattgtctcctggtttactggctacaaacaatgtctttcgcttaaaagggggtgcaccaattaaaggtgtaacctttggagaagatactgtttgggaagttcaaggttacaagaatgtgagaatcacatttgagcttgatgaacgtgttgacaaagtgcttaatgaaaagtgctctgtctacactgttgaatccggtaccgaagttactgagtttgcatgtgttgtagcagaggctgttgtgaagactttacaaccagtttctgatctccttaccaacatgggtattgatcttgatgagtggagtgtagctacattctacttatttgatgatgctggtgaagaaaacttttcatcacgtatgtattgttccttttaccctccagatgaggaagaagaggacgatgcagagtgtgaggaagaagaaattgatgaaacctgtgaacatgagtacggtacagaggatgattatcaaggtctccctctggaatttggtgcctcagctgaaacagttcgagttgaggaagaagaagaggaagactggctggatgatactactgagcaatcagagattgagccagaaccagaacctacacctgaagaaccagttaatcagtttactggttatttaaaacttactgacaatgttgccattaaatgtgttgacatcgttaaggaggcacaaagtgctaatcctatggtgattgtaaatgctgctaacatacacctgaaacatggtggtggtgtagcaggtgcactcaacaaggcaaccaatggtgccatgcaaaaggagagtgatgattacattaagctaaatggccctcttacagtaggagggtcttgtttgctttctggacataatcttgctaagaagtgtctgcatgttgttggacctaacctaaatgcaggtgaggacatccagcttcttaaggcagcatatgaaaatttcaattcacaggacatcttacttgcaccattgttgtcagcaggcatatttggtgctaaaccacttcagtctttacaagtgtgcgtgcagacggttcgtacacaggtttatattgcagtcaatgacaaagctctttatgagcaggttgtcatggattatcttgataacctgaagcctagagtggaagcacctaaacaagaggagccaccaaacacagaagattccaaaactgaggagaaatctgtcgtacagaagcctgtcgatgtgaagccaaaaattaaggcctgcattgatgaggttaccacaacactggaagaaactaagtttcttaccaataagttactcttgtttgctgatatcaatggtaagctttaccatgattctcagaacatgcttagaggtgaagatatgtctttccttgagaaggatgcaccttacatggtaggtgatgttatcactagtggtgatatcacttgtgttgtaataccctccaaaaaggctggtggcactactgagatgctctcaagagctttgaagaaagtgccagttgatgagtatataaccacgtaccctggacaaggatgtgctggttatacacttgaggaagctaagactgctcttaagaaatgcaaatctgcattttatgtactaccttcagaagcacctaatgctaaggaagagattctaggaactgtatcctggaatttgagagaaatgcttgctcatgctgaagagacaagaaaattaatgcctatatgcatggatgttagagccataatggcaaccatccaacgtaagtataaaggaattaaaattcaagagggcatcgttgactatggtgtccgattcttcttttatactagtaaagagcctgtagcttctattattacgaagctgaactctctaaatgagccgcttgtcacaatgccaattggttatgtgacacatggttttaatcttgaagaggctgcgcgctgtatgcgttctcttaaagctcctgccgtagtgtcagtatcatcaccagatgctgttactacatataatggatacctcacttcgtcatcaaagacatctgaggagcactttgtagaaacagtttctttggctggctcttacagagattggtcctattcaggacagcgtacagagttaggtgttgaatttcttaagcgtggtgacaaaattgtgtaccacactctggagagccccgtcgagtttcatcttgacggtgaggttctttcacttgacaaactaaagagtctcttatccctgcgggaggttaagactataaaagtgttcacaactgtggacaacactaatctccacacacagcttgtggatatgtctatgacatatggacagcagtttggtccaacatacttggatggtgctgatgttacaaaaattaaacctcatgtaaatcatgagggtaagactttctttgtactacctagtgatgacacactacgtagtgaagctttcgagtactaccatactcttgatgagagttttcttggtaggtacatgtctgctttaaaccacacaaagaaatggaaatttcctcaagttggtggtttaacttcaattaaatgggctgataacaattgttatttgtctagtgttttattagcacttcaacagcttgaagtcaaattcaatgcaccagcacttcaagaggcttattatagagcccgtgctggtgatgctgctaacttttgtgcactcatactcgcttacagtaataaaactgttggcgagcttggtgatgtcagagaaactatgacccatcttctacagcatgctaatttggaatctgcaaagcgagttcttaatgtggtgtgtaaacattgtggtcagaaaactactaccttaacgggtgtagaagctgtgatgtatatgggtactctatcttatgataatcttaagacaggtgtttccattccatgtgtgtgtggtcgtgatgctacacaatatctagtacaacaagagtcttcttttgttatgatgtctgcaccacctgctgagtataaattacagcaaggtacattcttatgtgcgaatgagtacactggtaactatcagtgtggtcattacactcatataactgctaaggagaccctctatcgtattgacggagctcaccttacaaagatgtcagagtacaaaggaccagtgactgatgttttctacaaggaaacatcttacactacaaccatcaagcctgtgtcgtataaactcgatggagttacttacacagagattgaaccaaaattggatgggtattataaaaaggataatgcttactatacagagcagcctatagaccttgtaccaactcaaccattaccaaatgcgagttttgataatttcaaactcacatgttctaacacaaaatttgctgatgatttaaatcaaatgacaggcttcacaaagccagcttcacgagagctatctgtcacattcttcccagacttgaatggcgatgtagtggctattgactatagacactattcagcgagtttcaagaaaggtgctaaattactgcataagccaattgtttggcacattaaccaggctacaaccaagacaacgttcaaaccaaacacttggtgtttacgttgtctttggagtacaaagccagtagatacttcaaattcatttgaagttctggcagtagaagacacacaaggaatggacaatcttgcttgtgaaagtcaacaacccacctctgaagaagtagtggaaaatcctaccatacagaaggaagtcatagagtgtgacgtgaaaactaccgaagttgtaggcaatgtcatacttaaaccatcagatgaaggtgttaaagtaacacaagagttaggtcatgaggatcttatggctgcttatgtggaaaacacaagcattaccattaagaaacctaatgagctttcactagccttaggtttaaaaacaattgccactcatggtattgctgcaattaatagtgttccttggagtaaaattttggcttatgtcaaaccattcttaggacaagcagcaattacaacatcaaattgcgctaagagattagcacaacgtgtgtttaacaattatatgccttatgtgtttacattattgttccaattgtgtacttttactaaaagtaccaattctagaattagagcttcactacctacaactattgctaaaaatagtgttaagagtgttgctaaattatgtttggatgccggcattaattatgtgaagtcacccaaattttctaaattgttcacaatcgctatgtggctattgttgttaagtatttgcttaggttctctaatctgtgtaactgctgcttttggtgtactcttatctaattttggtgctccttcttattgtaatggcgttagagaattgtatcttaattcgtctaacgttactactatggatttctgtgaaggttcttttccttgcagcatttgtttaagtggattagactcccttgattcttatccagctcttgaaaccattcaggtgacgatttcatcgtacaagctagacttgacaattttaggtctggccgctgagtgggttttggcatatatgttgttcacaaaattcttttatttattaggtctttcagctataatgcaggtgttctttggctattttgctagtcatttcatcagcaattcttggctcatgtggtttatcattagtattgtacaaatggcacccgtttctgcaatggttaggatgtacatcttctttgcttctttctactacatatggaagagctatgttcatatcatggatggttgcacctcttcgacttgcatgatgtgctataagcgcaatcgtgccacacgcgttgagtgtacaactattgttaatggcatgaagagatctttctatgtctatgcaaatggaggccgtggcttctgcaagactcacaattggaattgtctcaattgtgacacattttgcactggtagtacattcattagtgatgaagttgctcgtgatttgtcactccagtttaaaagaccaatcaaccctactgaccagtcatcgtatattgttgatagtgttgctgtgaaaaatggcgcgcttcacctctactttgacaaggctggtcaaaagacctatgagagacatccgctctcccattttgtcaatttagacaatttgagagctaacaacactaaaggttcactgcctattaatgtcatagtttttgatggcaagtccaaatgcgacgagtctgcttctaagtctgcttctgtgtactacagtcagctgatgtgccaacctattctgttgcttgaccaagctcttgtatcagacgttggagatagtactgaagtttccgttaagatgtttgatgcttatgtcgacaccttttcagcaacttttagtgttcctatggaaaaacttaaggcacttgttgctacagctcacagcgagttagcaaagggtgtagctttagatggtgtcctttctacattcgtgtcagctgcccgacaaggtgttgttgataccgatgttgacacaaaggatgttattgaatgtctcaaactttcacatcactctgacttagaagtgacaggtgacagttgtaacaatttcatgctcacctataataaggttgaaaacatgacgcccagagatcttggcgcatgtattgactgtaatgcaaggcatatcaatgcccaagtagcaaaaagtcacaatgtttcactcatctggaatgtaaaagactacatgtctttatctgaacagctgcgtaaacaaattcgtagtgctgccaagaagaacaacataccttttagactaacttgtgctacaactagacaggttgtcaatgtcataactactaaaatctcactcaagggtggtaagattgttagtacttgttttaaacttatgcttaaggccacattattgtgcgttcttgctgcattggtttgttatatcgttatgccagtacatacattgtcaatccatgatggttacacaaatgaaatcattggttacaaagccattcaggatggtgtcactcgtgacatcatttctactgatgattgttttgcaaataaacatgctggttttgacgcatggtttagccagcgtggtggttcatacaaaaatgacaaaagctgccctgtagtagctgctatcattacaagagagattggtttcatagtgcctggcttaccgggtactgtgctgagagcaatcaatggtgacttcttgcattttctacctcgtgtttttagtgctgttggcaacatttgctacacaccttccaaactcattgagtatagtgattttgctacctctgcttgcgttcttgctgctgagtgtacaatttttaaggatgctatgggcaaacctgtgccatattgttatgacactaatttgctagagggttctatttcttatagtgagcttcgtccagacactcgttatgtgcttatggatggttccatcatacagtttcctaacacttacctggagggttctgttagagtagtaacaacttttgatgctgagtactgtagacatggtacatgcgaaaggtcagaagtaggtatttgcctatctaccagtggtagatgggttcttaataatgagcattacagagctctatcaggagttttctgtggtgttgatgcgatgaatctcatagctaacatctttactcctcttgtgcaacctgtgggtgctttagatgtgtctgcttcagtagtggctggtggtattattgccatattggtgacttgtgctgcctactactttatgaaattcagacgtgtttttggtgagtacaaccatgttgttgctgctaatgcacttttgtttttgatgtctttcactatactctgtctggtaccagcttacagctttctgccgggagtctactcagtcttttacttgtacttgacattctatttcaccaatgatgtttcattcttggctcaccttcaatggtttgccatgttttctcctattgtgcctttttggataacagcaatctatgtattctgtatttctctgaagcactgccattggttctttaacaactatcttaggaaaagagtcatgtttaatggagttacatttagtaccttcgaggaggctgctttgtgtacctttttgctcaacaaggaaatgtacctaaaattgcgtagcgagacactgttgccacttacacagtataacaggtatcttgctctatataacaagtacaagtatttcagtggagccttagatactaccagctatcgtgaagcagcttgctgccacttagcaaaggctctaaatgactttagcaactcaggtgctgatgttctctaccaaccaccacagacatcaatcacttctgctgttctgcagagtggttttaggaaaatggcattcccgtcaggcaaagttgaagggtgcatggtacaagtaacctgtggaactacaactcttaatggattgtggttggatgacacagtatactgtccaagacatgtcatttgcacagcagaagacatgcttaatcctaactatgaagatctgctcattcgcaaatccaaccatagctttcttgttcaggctggcaatgttcaacttcgtgttattggccattctatgcaaaattgtctgcttaggcttaaagttgatacttctaaccctaagacacccaagtataaatttgtccgtatccaacctggtcaaacattttcagttctagcatgctacaatggttcaccatctggtgtttatcagtgtgccatgagacctaatcataccattaaaggttctttccttaatggatcatgtggtagtgttggttttaacattgattatgattgcgtgtctttctgctatatgcatcatatggagcttccaacaggagtacacgctggtactgacttagaaggtaaattctatggtccatttgttgacagacaaactgcacaggctgcaggtacagacacaaccataacattaaatgttttggcatggctgtatgctgctgttatcaatggtgataggtggtttcttaatagattcaccactactttgaatgactttaaccttgtggcaatgaagtacaactatgaacctttgacacaagatcatgttgacatattgggacctctttctgctcaaacaggaattgccgtcttagatatgtgtgctgctttgaaagagctgctgcagaatggtatgaatggtcgtactatccttggtagcactattttagaagatgagtttacaccatttgatgttgttagacaatgctctggtgttaccttccaaggtaagttcaagaaaattgttaagggcactcatcattggatgcttttaactttcttgacatcactattgattcttgttcaaagtacacagtggtcactgtttttctttgtttacgagaatgctttcttgccatttactcttggtattatggcaattgctgcatgtgctatgctgcttgttaagcataagcacgcattcttgtgcttgtttctgttaccttctcttgcaacagttgcttactttaatatggtctacatgcctgctagctgggtgatgcgtatcatgacatggcttgaattggctgacactagcttgtctggttataggcttaaggattgtgttatgtatgcttcagctttagttttgcttattctcatgacagctcgcactgtttatgatgatgctgctagacgtgtttggacactgatgaatgtcattacacttgtttacaaagtctactatggtaatgctttagatcaagctatttccatgtgggccttagttatttctgtaacctctaactattctggtgtcgttacgactattatgtttttagctagagctatagtgtttgtgtgtgttgagtattacccattgttatttattactggcaacaccttacagtgtatcatgcttgtttattgtttcttaggctattgttgctgctgctactttggccttttctgtttactcaaccgttacttcaggcttactcttggtgtttatgactacttggtctctacacaagaatttaggtatatgaactcccaggggcttttgcctcctaagagtagtattgatgctttcaagcttaacattaagttgttgggtattggaggtaaaccatgtatcaaggttgctactgtacagtctaaaatgtctgacgtaaagtgcacatctgtggtactgctctcggttcttcaacaacttagagtagagtcatcttctaaattgtgggcacaatgtgtacaactccacaatgatattcttcttgcaaaagacacaactgaagctttcgagaagatggtttctcttttgtctgttttgctatccatgcagggtgctgtagacattaataggttgtgcgaggaaatgctcgataaccgtgctactcttcaggctattgcttcagaatttagttctttaccatcatatgccgcttatgccactgcccaggaggcctatgagcaggctgtagctaatggtgattctgaagtcgttctcaaaaagttaaagaaatctttgaatgtggctaaatctgagtttgaccgtgatgctgccatgcaacgcaagttggaaaagatggcagatcaggctatgacccaaatgtacaaacaggcaagatctgaggacaagagggcaaaagtaactagtgctatgcaaacaatgctcttcactatgcttaggaagcttgataatgatgcacttaacaacattatcaacaatgcgcgtgatggttgtgttccactcaacatcataccattgactacagcagccaaactcatggttgttgtccctgattatggtacctacaagaacacttgtgatggtaacacctttacatatgcatctgcactctgggaaatccagcaagttgttgatgcggatagcaagattgttcaacttagtgaaattaacatggacaattcaccaaatttggcttggcctcttattgttacagctctaagagccaactcagctgttaaactacagaataatgaactgagtccagtagcactacgacagatgtcctgtgcggctggtaccacacaaacagcttgtactgatgacaatgcacttgcctactataacaattcgaagggaggtaggtttgtgctggcattactatcagaccaccaagatctcaaatgggctagattccctaagagtgatggtacaggtacaatttacacagaactggaaccaccttgtaggtttgttacagacacaccaaaagggcctaaagtgaaatacttgtacttcatcaaaggcttaaacaacctaaatagaggtatggtgctgggcagtttagctgctacagtacgtcttcaggctggaaatgctacagaagtacctgccaattcaactgtgctttccttctgtgcttttgcagtagaccctgctaaagcatataaggattacctagcaagtggaggacaaccaatcaccaactgtgtgaagatgttgtgtacacacactggtacaggacaggcaattactgtaacaccagaagctaacatggaccaagagtcctttggtggtgcttcatgttgtctgtattgtagatgccacattgaccatccaaatcctaaaggattctgtgacttgaaaggtaagtacgtccaaatacctaccacttgtgctaatgacccagtgggttttacacttagaaacacagtctgtaccgtctgcggaatgtggaaaggttatggctgtagttgtgaccaactccgcgaacccttgatgcagtctgcggatgcatcaacgtttttaaacgggtttgcggtgtaagtgcagcccgtcttacaccgtgcggcacaggcactagtactgatgtcgtctacagggcttttgatatttacaacgaaaaagttgctggttttgcaaagttcctaaaaactaattgctgtcgcttccaggagaaggatgaggaaggcaatttattagactcttactttgtagttaagaggcatactatgtctaactaccaacatgaagagactatttataacttggttaaagattgtccagcggttgctgtccatgactttttcaagtttagagtagatggtgacatggtaccacatatatcacgtcagcgtctaactaaatacacaatggctgatttagtctatgctctacgtcattttgatgagggtaattgtgatacattaaaagaaatactcgtcacatacaattgctgtgatgatgattatttcaataagaaggattggtatgacttcgtagagaatcctgacatcttacgcgtatatgctaacttaggtgagcgtgtacgccaatcattattaaagactgtacaattctgcgatgctatgcgtgatgcaggcattgtaggcgtactgacattagataatcaggatcttaatgggaactggtacgatttcggtgatttcgtacaagtagcaccaggctgcggagttcctattgtggattcatattactcattgctgatgcccatcctcactttgactagggcattggctgctgagtcccatatggatgctgatctcgcaaaaccacttattaagtgggatttgctgaaatatgattttacggaagagagactttgtctcttcgaccgttattttaaatattgggaccagacataccatcccaattgtattaactgtttggatgataggtgtatccttcattgtgcaaactttaatgtgttattttctactgtgtttccacctacaagttttggaccactagtaagaaaaatatttgtagatggtgttccttttgttgtttcaactggataccattttcgtgagttaggagtcgtacataatcaggatgtaaacttacatagctcgcgtctcagtttcaaggaacttttagtgtatgctgctgatccagctatgcatgcagcttctggcaatttattgctagataaacgcactacatgcttttcagtagctgcactaacaaacaatgttgcttttcaaactgtcaaacccggtaattttaataaagacttttatgactttgctgtgtctaaaggtttctttaaggaaggaagttctgttgaactaaaacacttcttctttgctcaggatggcaacgctgctatcagtgattatgactattatcgttataatctgccaacaatgtgtgatatcagacaactcctattcgtagttgaagttgttgataaatactttgattgttacgatggtggctgtattaatgccaaccaagtaatcgttaacaatctggataaatcagctggtttcccatttaataaatggggtaaggctagactttattatgactcaatgagttatgaggatcaagatgcacttttcgcgtatactaagcgtaatgtcatccctactataactcaaatgaatcttaagtatgccattagtgcaaagaatagagctcgcaccgtagctggtgtctctatctgtagtactatgacaaatagacagtttcatcagaaattattgaagtcaatagccgccactagaggagctactgtggtaattggaacaagcaagttttacggtggctggcataatatgttaaaaactgtttacagtgatgtagaaactccacaccttatgggttgggattatccaaaatgtgacagagccatgcctaacatgcttaggataatggcctctcttgttcttgctcgcaaacataacacttgctgtaacttatcacaccgtttctacaggttagctaacgagtgtgcgcaagtattaagtgagatggtcatgtgtggcggctcactatatgttaaaccaggtggaacatcatccggtgatgctacaactgcttatgctaatagtgtctttaacatttgtcaagctgttacagccaatgtaaatgcacttctttcaactgatggtaataagatagctgacaagtatgtccgcaatctacaacacaggctctatgagtgtctctatagaaatagggatgttgatcatgaattcgtggatgagttttacgcttacctgcgtaaacatttctccatgatgattctttctgatgatgccgttgtgtgctataacagtaactatgcggctcaaggtttagtagctagcattaagaactttaaggcagttctttattatcaaaataatgtgttcatgtctgaggcaaaatgttggactgagactgaccttactaaaggacctcacgaattttgctcacagcatacaatgctagttaaacaaggagatgattacgtgtacctgccttacccagatccatcaagaatattaggcgcaggctgttttgtcgatgatattgtcaaaacagatggtacacttatgattgaaaggttcgtgtcactggctattgatgcttacccacttacaaaacatcctaatcaggagtatgctgatgtctttcacttgtatttacaatacattagaaagttacatgatgagcttactggccacatgttggacatgtattccgtaatgctaactaatgataacacctcacggtactgggaacctgagttttatgaggctatgtacacaccacatacagtcttgcaggctgtaggtgcttgtgtattgtgcaattcacagacttcacttcgttgcggtgcctgtattaggagaccattcctatgttgcaagtgctgctatgaccatgtcatttcaacatcacacaaattagtgttgtctgttaatccctatgtttgcaatgccccaggttgtgatgtcactgatgtgacacaactgtatctaggaggtatgagctattattgcaagtcacataagcctcccattagttttccattatgtgctaatggtcaggtttttggtttatacaaaaacacatgtgtaggcagtgacaatgtcactgacttcaatgcgatagcaacatgtgattggactaatgctggcgattacatacttgccaacacttgtactgagagactcaagcttttcgcagcagaaacgctcaaagccactgaggaaacatttaagctgtcatatggtattgccactgtacgcgaagtactctctgacagagaattgcatctttcatgggaggttggaaaacctagaccaccattgaacagaaactatgtctttactggttaccgtgtaactaaaaatagtaaagtacagattggagagtacacctttgaaaaaggtgactatggtgatgctgttgtgtacagaggtactacgacatacaagttgaatgttggtgattactttgtgttgacatctcacactgtaatgccacttagtgcacctactctagtgccacaagagcactatgtgagaattactggcttgtacccaacactcaacatctcagatgagttttctagcaatgttgcaaattatcaaaaggtcggcatgcaaaagtactctacactccaaggaccacctggtactggtaagagtcattttgccatcggacttgctctctattacccatctgctcgcatagtgtatacggcatgctctcatgcagctgttgatgccctatgtgaaaaggcattaaaatatttgcccatagataaatgtagtagaatcatacctgcgcgtgcgcgcgtagagtgttttgataaattcaaagtgaattcaacactagaacagtatgttttctgcactgtaaatgcattgccagaaacaactgctgacattgtagtctttgatgaaatctctatggctactaattatgacttgagtgttgtcaatgctagacttcgtgcaaaacactacgtctatattggcgatcctgctcaattaccagccccccgcacattgctgactaaaggcacactagaaccagaatattttaattcagtgtgcagacttatgaaaacaataggtccagacatgttccttggaacttgtcgccgttgtcctgctgaaattgttgacactgtgagtgctttagtttatgacaataagctaaaagcacacaaggataagtcagctcaatgcttcaaaatgttctacaaaggtgttattacacatgatgtttcatctgcaatcaacagacctcaaataggcgttgtaagagaatttcttacacgcaatcctgcttggagaaaagctgtttttatctcaccttataattcacagaacgctgtagcttcaaaaatcttaggattgcctacgcagactgttgattcatcacagggttctgaatatgactatgtcatattcacacaaactactgaaacagcacactcttgtaatgtcaaccgcttcaatgtggctatcacaagggcaaaaattggcattttgtgcataatgtctgatagagatctttatgacaaactgcaatttacaagtctagaaataccacgtcgcaatgtggctacattacaagcagaaaatgtaactggactttttaaggactgtagtaagatcattactggtcttcatcctacacaggcacctacacacctcagcgttgatataaagttcaagactgaaggattatgtgttgacataccaggcataccaaaggacatgacctaccgtagactcatctctatgatgggtttcaaaatgaattaccaagtcaatggttaccctaatatgtttatcacccgcgaagaagctattcgtcacgttcgtgcgtggattggctttgatgtagagggctgtcatgcaactagagatgctgtgggtactaacctacctctccagctaggattttctacaggtgttaacttagtagctgtaccgactggttatgttgacactgaaaataacacagaattcaccagagttaatgcaaaacctccaccaggtgaccagtttaaacatcttataccactcatgtataaaggcttgccctggaatgtagtgcgtattaagatagtacaaatgctcagtgatacactgaaaggattgtcagacagagtcgtgttcgtcctttgggcgcatggctttgagcttacatcaatgaagtactttgtcaagattggacctgaaagaacgtgttgtctgtgtgacaaacgtgcaacttgcttttctacttcatcagatacttatgcctgctggaatcattctgtgggttttgactatgtctataacccatttatgattgatgttcagcagtggggctttacgggtaaccttcagagtaaccatgaccaacattgccaggtacatggaaatgcacatgtggctagttgtgatgctatcatgactagatgtttagcagtccatgagtgctttgttaagcgcgttgattggtctgttgaataccctattataggagatgaactgagggttaattctgcttgcagaaaagtacaacacatggttgtgaagtctgcattgcttgctgataagtttccagttcttcatgacataggaaatccaaaggctatcaagtgtgtgcctcaggctgaagtagaatggaagttctacgatgctcagccatgtagtgacaaagcttacaaaatagaggaactcttctattcttatgctatacatcacgataaattcactgatggtgtttgtttgttttggaattgtaacgttgatcgttacccagccaatgcaattgtgtgtaggtttgacacaagagtcttgtcaaacttgaacttaccaggctgtgatggtggtagtttgtatgtgaataagcatgcattccacactccagctttcgataaaagtgcatttactaatttaaagcaattgcctttcttttactattctgatagtccttgtgagtctcatggcaaacaagtagtgtcggatattgattatgttccactcaaatctgctacgtgtattacacgatgcaatttaggtggtgctgtttgcagacaccatgcaaatgagtaccgacagtacttggatgcatataatatgatgatttctgctggatttagcctatggatttacaaacaatttgatacttataacctgtggaatacatttaccaggttacagagtttagaaaatgtggcttataatgttgttaataaaggacactttgatggacacgccggcgaagcacctgtttccatcattaataatgctgtttacacaaaggtagatggtattgatgtggagatctttgaaaataagacaacacttcctgttaatgttgcatttgagctttgggctaagcgtaacattaaaccagtgccagagattaagatactcaataatttgggtgttgatatcgctgctaatactgtaatctgggactacaaaagagaagccccagcacatgtatctacaataggtgtctgcacaatgactgacattgccaagaaacctactgagagtgcttgttcttcacttactgtcttgtttgatggtagagtggaaggacaggtagacctttttagaaacgcccgtaatggtgttttaataacagaaggttcagtcaaaggtctaacaccttcaaagggaccagcacaagctagcgtcaatggagtcacattaattggagaatcagtaaaaacacagtttaactactttaagaaagtagacggcattattcaacagttgcctgaaacctactttactcagagcagagacttagaggattttaagcccagatcacaaatggaaactgactttctcgagctcgctatggatgaattcatacagcgatataagctcgagggctatgccttcgaacacatcgtttatggagatttcagtcatggacaacttggcggtcttcatttaatgataggcttagccaagcgctcacaagattcaccacttaaattagaggattttatccctatggacagcacagtgaaaaattacttcataacagatgcgcaaacaggttcatcaaaatgtgtgtgttctgtgattgatcttttacttgatgactttgtcgagataataaagtcacaagatttgtcagtgatttcaaaagtggtcaaggttacaattgactatgctgaaatttcattcatgctttggtgtaaggatggacatgttgaaaccttctacccaaaactacaagcaagtcaagcgtggcaaccaggtgttgcgatgcctaacttgtacaagatgcaaagaatgcttcttgaaaagtgtgaccttcagaattatggtgaaaatgctgttataccaaaaggaataatgatgaatgtcgcaaagtatactcaactgtgtcaatacttaaatacacttactttagctgtaccctacaacatgagagttattcactttggtgctggctctgataaaggagttgcaccaggtacagctgtgctcagacaatggttgccaactggcacactacttgtcgattcagatcttaatgacttcgtctccgacgcagattctactttaattggagactgtgcaacagtacatacggctaataaatgggaccttattattagcgatatgtatgaccctaggaccaaacatgtgacaaaagagaatgactctaaagaagggtttttcacttatctgtgtggatttataaagcaaaaactagccctgggtggttctatagctgtaaagataacagagcattcttggaatgctgacctttacaagcttatgggccatttctcatggtggacagcttttgttacaaatgtaaatgcatcatcatcggaagcatttttaattggggctaactatcttggcaagccgaaggaacaaattgatggctataccatgcatgctaactacattttctggaggaacacaaatcctatccagttgtcttcctattcactctttgacatgagcaaatttcctcttaaattaagaggaactgctgtaatgtctcttaaggagaatcaaatcaatgatatgatttattctcttctggaaaaaggtaggcttatcattagagaaaacaacagagttgtggtttcaagtgatattcttgttaacaactaaacgaacatgtttattttcttattatttcttactctcactagtggtagtgaccttgaccggtgcaccacttttgatgatgttcaagctcctaattacactcaacatacttcatctatgaggggggtttactatcctgatgaaatttttagatcagacactctttatttaactcaggatttatttcttccattttattctaatgttacagggtttcatactattaatcatacgtttggcaaccctgtcataccttttaaggatggtatttattttgctgccacagagaaatcaaatgttgtccgtggttgggtttttggttctaccatgaacaacaagtcacagtcggtgattattattaacaattctactaatgttgttatacgagcatgtaactttgaattgtgtgacaaccctttctttgctgtttctaaacccatgggtacacagacacatactatgatattcgataatgcatttaattgcactttcgagtacatatctgatgccttttcgcttgatgtttcagaaaagtcaggtaattttaaacacttacgagagtttgtgtttaaaaataaagatgggtttctctatgtttataagggctatcaacctatagatgtagttcgtgatctaccttctggttttaacactttgaaacctatttttaagttgcctcttggtattaacattacaaattttagagccattcttacagccttttcacctgctcaagacatttggggcacgtcagctgcagcctattttgttggctatttaaagccaactacatttatgctcaagtatgatgaaaatggtacaatcacagatgctgttgattgttctcaaaatccacttgctgaactcaaatgctctgttaagagctttgagattgacaaaggaatttaccagacctctaatttcagggttgttccctcaggagatgttgtgagattccctaatattacaaacttgtgtccttttggagaggtttttaatgctactaaattcccttctgtctatgcatgggagagaaaaaaaatttctaattgtgttgctgattactctgtgctctacaactcaacatttttttcaacctttaagtgctatggcgtttctgccactaagttgaatgatctttgcttctccaatgtctatgcagattcttttgtagtcaagggagatgatgtaagacaaatagcgccaggacaaactggtgttattgctgattataattataaattgccagatgatttcatgggttgtgtccttgcttggaatactaggaacattgatgctacttcaactggtaattataattataaatataggtatcttagacatggcaagcttaggccctttgagagagacatatctaatgtgcctttctcccctgatggcaaaccttgcaccccacctgctcttaattgttattggccattaaatgattatggtttttacaccactactggcattggctaccaaccttacagagttgtagtactttcttttgaacttttaaatgcaccggccacggtttgtggaccaaaattatccactgaccttattaagaaccagtgtgtcaattttaattttaatggactcactggtactggtgtgttaactccttcttcaaagagatttcaaccatttcaacaatttggccgtgatgtttctgatttcactgattccgttcgagatcctaaaacatctgaaatattagacatttcaccttgctcttttgggggtgtaagtgtaattacacctggaacaaatgcttcatctgaagttgctgttctatatcaagatgttaactgcactgatgtttctacagcaattcatgcagatcaactcacaccagcttggcgcatatattctactggaaacaatgtattccagactcaagcaggctgtcttataggagctgagcatgtcgacacttcttatgagtgcgacattcctattggagctggcatttgtgctagttaccatacagtttctttattacgtagtactagccaaaaatctattgtggcttatactatgtctttaggtgctgatagttcaattgcttactctaataacaccattgctatacctactaacttttcaattagcattactacagaagtaatgcctgtttctatggctaaaacctccgtagattgtaatatgtacatctgcggagattctactgaatgtgctaatttgcttctccaatatggtagcttttgcacacaactaaatcgtgcactctcaggtattgctgctgaacaggatcgcaacacacgtgaagtgttcgctcaagtcaaacaaatgtacaaaaccccaactttgaaatattttggtggttttaatttttcacaaatattacctgaccctctaaagccaactaagaggtcttttattgaggacttgctctttaataaggtgacactcgctgatgctggcttcatgaagcaatatggcgaatgcctaggtgatattaatgctagagatctcatttgtgcgcagaagttcaatggacttacagtgttgccacctctgctcactgatgatatgattgctgcctacactgctgctctagttagtggtactgccactgctggatggacatttggtgctggcgctgctcttcaaataccttttgctatgcaaatggcatataggttcaatggcattggagttacccaaaatgttctctatgagaaccaaaaacaaatcgccaaccaatttaacaaggcgattagtcaaattcaagaatcacttacaacaacatcaactgcattgggcaagctgcaagacgttgttaaccagaatgctcaagcattaaacacacttgttaaacaacttagctctaattttggtgcaatttcaagtgtgctaaatgatatcctttcgcgacttgataaagtcgaggcggaggtacaaattgacaggttaattacaggcagacttcaaagccttcaaacctatgtaacacaacaactaatcagggctgctgaaatcagggcttctgctaatcttgctgctactaaaatgtctgagtgtgttcttggacaatcaaaaagagttgacttttgtggaaagggctaccaccttatgtccttcccacaagcagccccgcatggtgttgtcttcctacatgtcacgtatgtgccatcccaggagaggaacttcaccacagcgccagcaatttgtcatgaaggcaaagcatacttccctcgtgaaggtgtttttgtgtttaatggcacttcttggtttattacacagaggaacttcttttctccacaaataattactacagacaatacatttgtctcaggaaattgtgatgtcgttattggcatcattaacaacacagtttatgatcctctgcaacctgagcttgactcattcaaagaagagctggacaagtacttcaaaaatcatacatcaccagatgttgattttggcgacatttcaggcattaacgcttctgtcgtcaacattcaaaaagaaattgaccgcctcaatgaggtcgctaaaaatttaaatgaatcactcattgaccttcaagaattgggaaaatatgagcaatatattaaatggccttggtatgtttggctcggcttcattgctggactaattgccatcgtcatggttacaatcttgctttgttgcatgactagttgttgcagttgcctcaagggtgcatgctcttgtggttcttgctgcaagtttgatgaggatgactctgagccagttctcaagggtgtcaaattacattacacataaacgaacttatggatttgtttatgagattttttactcttggatcaattactgcacagccagtaaaaattgacaatgcttctcctgcaagtactgttcatgctacagcaacgataccgctacaagcctcactccctttcggatggcttgttattggcgttgcatttcttgctgtttttcagagcgctaccaaaataattgcgctcaataaaagatggcagctagccctttataagggcttccagttcatttgcaatttactgctgctatttgttaccatctattcacatcttttgcttgtcgctgcaggtatggaggcgcaatttttgtacctctatgccttgatatattttctacaatgcatcaacgcatgtagaattattatgagatgttggctttgttggaagtgcaaatccaagaacccattactttatgatgccaactactttgtttgctggcacacacataactatgactactgtataccatataacagtgtcacagatacaattgtcgttactgaaggtgacggcatttcaacaccaaaactcaaagaagactaccaaattggtggttattctgaggataggcactcaggtgttaaagactatgtcgttgtacatggctatttcaccgaagtttactaccagcttgagtctacacaaattactacagacactggtattgaaaatgctacattcttcatctttaacaagcttgttaaagacccaccgaatgtgcaaatacacacaatcgacggctcttcaggagttgctaatccagcaatggatccaatttatgatgagccgacgacgactactagcgtgcctttgtaagcacaagaaagtgagtacgaacttatgtactcattcgtttcggaagaaacaggtacgttaatagttaatagcgtacttctttttcttgctttcgtggtattcttgctagtcacactagccatccttactgcgcttcgattgtgtgcgtactgctgcaatattgttaacgtgagtttagtaaaaccaacggtttacgtctactcgcgtgttaaaaatctgaactcttctgaaggagttcctgatcttctggtctaaacgaactaactattattattattctgtttggaactttaacattgcttatcatggcagacaacggtactattaccgttgaggagcttaaacaactcctggaacaatggaacctagtaataggtttcctattcctagcctggattatgttactacaatttgcctattctaatcggaacaggtttttgtacataataaagcttgttttcctctggctcttgtggccagtaacacttgcttgttttgtgcttgctgttgtctacagaattaattgggtgactggcgggattgcgattgcaatggcttgtattgtaggcttgatgtggcttagctacttcgttgcttccttcaggctgtttgctcgtacccgctcaatgtggtcattcaacccagaaacaaacattcttctcaatgtgcctctccgggggacaattgtgaccagaccgctcatggaaagtgaacttgtcattggtgctgtgatcattcgtggtcacttgcgaatggccggacactccctagggcgctgtgacattaaggacctgccaaaagagatcactgtggctacatcacgaacgctttcttattacaaattaggagcgtcgcagcgtgtaggcactgattcaggttttgctgcatacaaccgctaccgtattggaaactataaattaaatacagaccacgccggtagcaacgacaatattgctttgctagtacagtaagtgacaacagatgtttcatcttgttgacttccaggttacaatagcagagatattgattatcattatgaggactttcaggattgctatttggaatcttgacgttataataagttcaatagtgagacaattatttaagcctctaactaagaagaattattcggagttagatgatgaagaacctatggagttagattatccataaaacgaacatgaaaattattctcttcctgacattgattgtatttacatcttgcgagctatatcactatcaggagtgtgttagaggtacgactgtactactaaaagaaccttgcccatcaggaacatacgagggcaattcaccatttcaccctcttgctgacaataaatttgcactaacttgcactagcacacactttgcttttgcttgtgctgacggtactcgacatacctatcagctgcgtgcaagatcagtttcaccaaaacttttcatcagacaagaggaggttcaacaagagctctactcgccactttttctcattgttgctgctctagtatttttaatactttgcttcaccattaagagaaagacagaatgaatgagctcactttaattgacttctatttgtgctttttagcctttctgctattccttgttttaataatgcttattatattttggttttcactcgaaatccaggatctagaagaaccttgtaccaaagtctaaacgaacatgaaacttctcattgttttgacttgtatttctctatgcagttgcatatgcactgtagtacagcgctgtgcatctaataaacctcatgtgcttgaagatccttgtaaggtacaacactaggggtaatacttatagcactgcttggctttgtgctctaggaaaggttttaccttttcatagatggcacactatggttcaaacatgcacacctaatgttactatcaactgtcaagatccagctggtggtgcgcttatagctaggtgttggtaccttcatgaaggtcaccaaactgctgcatttagagacgtacttgttgttttaaataaacgaacaaattaaaatgtctgataatggaccccaatcaaaccaacgtagtgccccccgcattacatttggtggacccacagattcaactgacaataaccagaatggaggacgcaatggggcaaggccaaaacagcgccgaccccaaggtttacccaataatattgcgtcttggttcacagctctcactcagcatggcaaggaggaacttagattccctcgaggccagggcgttccaatcaacaccaatagtggtccagatgaccaaattggctactaccgaagagctacccgacgagttcgtggtggtgacggcaaaatgaaagagctcagccccagatggtacttctattacctaggaactggcccagaagcttcacttccctacggcgctaacaaagaaggcatcgtatgggttgcaactgagggagccttgaatacacccaaagaccacattggcacccgcaatcctaataacaatgctgccaccgtgctacaacttcctcaaggaacaacattgccaaaaggcttctacgcagagggaagcagaggcggcagtcaagcctcttctcgctcctcatcacgtagtcgcggtaattcaagaaattcaactcctggcagcagtaggggaaattctcctgctcgaatggctagcggaggtggtgaaactgccctcgcgctattgctgctagacagattgaaccagcttgagagcaaagtttctggtaaaggccaacaacaacaaggccaaactgtcactaagaaatctgctgctgaggcatctaaaaagcctcgccaaaaacgtactgccacaaaacagtacaacgtcactcaagcatttgggagacgtggtccagaacaaacccaaggaaatttcggggaccaagacctaatcagacaaggaactgattacaaacattggccgcaaattgcacaatttgctccaagtgcctctgcattctttggaatgtcacgcattggcatggaagtcacaccttcgggaacatggctgacttatcatggagccattaaattggatgacaaagatccacaattcaaagacaacgtcatactgctgaacaagcacattgacgcatacaaaacattcccaccaacagagcctaaaaaggacaaaaagaaaaagactgatgaagctcagcctttgccgcagagacaaaagaagcagcccactgtgactcttcttcctgcggctgacatggatgatttctccagacaacttcaaaattccatgagtggagcttctgctgattcaactcaggcataaacactcatgatgaccacacaaggcagatgggctatgtaaacgttttcgcaattccgtttacgatacatagtctactcttgtgcagaatgaattctcgtaactaaacagcacaagtaggtttagttaactttaatctcacatagcaatctttaatcaatgtgtaacattagggaggacttgaaagagccaccacattttcatcgaggccacgcggagtacgatcgagggtacagtgaataatgctagggagagctgcctatatggaagagccctaatgtgtaaaattaattttagtagtgctatccccatgtgattttaatagcttcttaggagaatgacaaaaaaaaaaaaa

SEQ ID NO: 58 - DNA, 29727 bp, Coronavirus
atattaggtttttacctacccaggaaaagccaaccaacctcgatctcttgtagatctgttctctaaacgaactttaaaatctgtgtagctgtcgctcggctgcatgcctagtgcacctacgcagtataaacaataataaattttactgtcgttgacaagaaacgagtaactcgtccctcttctgcagactgcttacggtttcgtccgtgttgcagtcgatcatcagcatacctaggtttcgtccgggtgtgaccgaaaggtaagatggagagccttgttcttggtgtcaacgagaaaacacacgtccaactcagtttgcctgtccttcaggttagagacgtgctagtgcgtggcttcggggactctgtggaagaggccctatcggaggcacgtgaacacctcaaaaatggcacttgtggtctagtagagctggaaaaaggcgtactgccccagcttgaacagccctatgtgttcattaaacgttctgatgccttaagcaccaatcacggccacaaggtcgttgagctggttgcagaaatggacggcattcagtacggtcgtagcggtataacactgggagtactcgtgccacatgtgggcgaaaccccaattgcataccgcaatgttcttcttcgtaagaacggtaataagggagccggtggtcatagctatggcatcgatctaaagtcttatgacttaggtgacgagcttggcactgatcccattgaagattatgaacaaaactggaacactaagcatggcagtggtgcactccgtgaactcactcgtgagctcaatggaggtgcagtcactcgctatgtcgacaacaatttctgtggcccagatgggtaccctcttgattgcatcaaagattttctcgcacgcgcgggcaagtcaatgtgcactctttccgaacaacttgattacatcgagtcgaagagaggtgtctactgctgccgtgaccatgagcatgaaattgcctggttcactgagcgctctgataagagctacgagcaccagacacccttcgaaattaagagtgccaagaaatttgacactttcaaaggggaatgcccaaagtttgtgtttcctcttaactcaaaagtcaaagtcattcaaccacgtgttgaaaagaaaaagactgagggtttcatggggcgtatacgctctgtgtaccctgttgcatctccacaggagtgtaacaatatgcacttgtctaccttgatgaaatgtaatcattgcgatgaagtttcatggcagacgtgcgactttctgaaagccacttgtgaacattgtggcactgaaaatttagttattgaaggacctactacatgtgggtacctacctactaatgctgtagtgaaaatgccatgtcctgcctgtcaagacccagagattggacctgagcatagtgttgcagattatcacaaccactcaaacattgaaactcgactccgcaagggaggtaggactagatgttttggaggctgtgtgtttgcctatgttggctgctataataagcgtgcctactgggttcctcgtgctagtgctgatattggctcaggccatactggcattactggtgacaatgtggagaccttgaatgaggatctccttgagatactgagtcgtgaacgtgttaacattaacattgttggcgattttcatttgaatgaagaggttgccatcattttggcatctttctctgcttctacaagtgcctttattgacactataaagagtcttgattacaagtctttcaaaaccattgttgagtcctgcggtaactataaagttaccaagggaaagcccgtaaaaggtgcttggaacattggacaacagagatcagttttaacaccactgtgtggttttccctcacaggctgctggtgttatcagatcaatttttgcgcgcacacttgatgcagcaaaccactcaattcctgatttgcaaagagcagctgtcaccatacttgatggtatttctgaacagtcattacgtcttgtcgacgccatggtttatacttcagacctgctcaccaacagtgtcattattatggcatatgtaactggtggtcttgtacaacagacttctcagtggttgtctaatcttttgggcactactgttgaaaaactcaggcctatctttgaatggattgaggcgaaacttagtgcaggagttgaatttctcaaggatgcttgggagattctcaaatttctcattacaggtgtttttgacatcgtcaagggtcaaatacaggttgcttcagataacatcaaggattgtgtaaaatgcttcattgatgttgttaacaaggcactcgaaatgtgcattgatcaagtcactatcgctggcgcaaagttgcgatcactcaacttaggtgaagtcttcatcgctcaaagcaagggactttaccgtcagtgtatacgtggcaaggagcagctgcaactactcatgcctcttaaggcaccaaaagaagtaacctttcttgaaggtgattcacatgacacagtacttacctctgaggaggttgttctcaagaacggtgaactcgaaacactcgagacgcccgttgatagcttcacaaatggagctatcgttggcacaccagtctgtgtaaatggcctcatgctcttagagattaaggacaaagaacaatactgcgcattgtctcctggtttactggctacaaacaatgtctttcgcttaaaagggggtgcaccaattaaaggtgtaacctttggagaagatactgtttgggaagttcaaggttacaagaatgtgagaatcacatttgagcttgatgaacgtgttgacaaagtgcttaatgaaaagtgctctgtctacactgttgaatccggtaccgaagttactgagtttgcatgtgttgtagcagaggctgttgtgaagactttacaaccagtttctgatctccttaccaacatgggtattgatcttgatgagtggagtgtagctacattctacttatttgatgatgctggtgaagaaaacttttcatcacgtatgtattgttccttttaccctccagatgaggaagaagaggacgatgcagagtgtgaggaagaagaaattgatgaaacctgtgaacatgagtacggtacagaggatgattatcaaggtctccctctggaatttggtgcctcagctgaaacagttcgagttgaggaagaagaagaggaagactggctggatgatactactgagcaatcagagattgagccagaaccagaacctacacctgaagaaccagttaatcagtttactggttatttaaaacttactgacaatgttgccattaaatgtgttgacatcgttaaggaggcacaaagtgctaatcctatggtgattgtaaatgctgctaacatacacctgaaacatggtggtggtgtagcaggtgcactcaacaaggcaaccaatggtgccatgcaaaaggagagtgatgattacattaagctaaatggccctcttacagtaggagggtcttgtttgctttctggacataatcttgctaagaagtgtctgcatgttgttggacctaacctaaatgcaggtgaggacatccagcttcttaaggcagcatatgaaaatttcaattcacaggacatcttacttgcaccattgttgtcagcaggcatatttggtgctaaaccacttcagtctttacaagtgtgcgtgcagacggttcgtacacaggtttatattgcagtcaatgacaaagctctttatgagcaggttgtcatggattatcttgataacctgaagcctagagtggaagcacctaaacaagaggagccaccaaacacagaagattccaaaactgaggagaaatctgtcgtacagaagcctgtcgatgtgaagccaaaaattaaggcctgcattgatgaggttaccacaacactggaagaaactaagtttcttaccaataagttactcttgtttgctgatatcaatggtaagctttaccatgattctcagaacatgcttagaggtgaagatatgtctttccttgagaaggatgcaccttacatggtaggtgatgttatcactagtggtgatatcacttgtgttgtaataccctccaaaaaggctggtggcactactgagatgctctcaagagctttgaagaaagtgccagttgatgagtatataaccacgtaccctggacaaggatgtgctggttatacacttgaggaagctaagactgctcttaagaaatgcaaatctgcattttatgtactaccttcagaagcacctaatgctaaggaagagattctaggaactgtatcctggaatttgagagaaatgcttgctcatgctgaagagacaagaaaattaatgcctatatgcatggatgttagagccataatggcaaccatccaacgtaagtataaaggaattaaaattcaagagggcatcgttgactatggtgtccgattcttcttttatactagtaaagagcctgtagcttctattattacgaagctgaactctctaaatgagccgcttgtcacaatgccaattggttatgtgacacatggttttaatcttgaagaggctgcgcgctgtatgcgttctcttaaagctcctgccgtagtgtcagtatcatcaccagatgctgttactacatataatggatacctcacttcgtcatcaaagacatctgaggagcactttgtagaaacagtttctttggctggctcttacagagattggtcctattcaggacagcgtacagagttaggtgttgaatttcttaagcgtggtgacaaaattgtgtaccacactctggagagccccgtcgagtttcatcttgacggtgaggttctttcacttgacaaactaaagagtctcttatccctgcgggaggttaagactataaaagtgttcacaactgtggacaacactaatctccacacacagcttgtggatatgtctatgacatatggacagcagtttggtccaacatacttggatggtgctgatgttacaaaaattaaacctcatgtaaatcatgagggtaagactttctttgtactacctagtgatgacacactacgtagtgaagctttcgagtactaccatactcttgatgagagttttcttggtaggtacatgtctgctttaaaccacacaaagaaatggaaatttcctcaagttggtggtttaacttcaattaaatgggctgataacaattgttatttgtctagtgttttattagcacttcaacagcttgaagtcaaattcaatgcaccagcacttcaagaggcttattatagagcccgtgctggtgatgctgctaacttttgtgcactcatactcgcttacagtaataaaactgttggcgagcttggtgatgtcagagaaactatgacccatcttctacagcatgctaatttggaatctgcaaagcgagttcttaatgtggtgtgtaaacattgtggtcagaaaactactaccttaacgggtgtagaagctgtgatgtatatgggtactctatcttatgataatcttaagacaggtgtttccattccatgtgtgtgtggtcgtgatgctacacaatatctagtacaacaagagtcttcttttgttatgatgtctgcaccacctgctgagtataaattacagcaaggtacattcttatgtgcgaatgagtacactggtaactatcagtgtggtcattacactcatataactgctaaggagaccctctatcgtattgacggagctcaccttacaaagatgtcagagtacaaaggaccagtgactgatgttttctacaaggaaacatcttacactacaaccatcaagcctgtgtcgtataaactcgatggagttacttacacagagattgaaccaaaattggatgggtattataaaaaggataatgcttactatacagagcagcctatagaccttgtaccaactcaaccattaccaaatgcgagttttgataatttcaaactcacatgttctaacacaaaatttgctgatgatttaaatcaaatgacaggcttcacaaagccagcttcacgagagctatctgtcacattcttcccagacttgaatggcgatgtagtggctattgactatagacactattcagcgagtttcaagaaaggtgctaaattactgcataagccaattgtttggcacattaaccaggctacaaccaagacaacgttcaaaccaaacacttggtgtttacgttgtctttggagtacaaagccagtagatacttcaaattcatttgaagttctggcagtagaagacacacaaggaatggacaatcttgcttgtgaaagtcaacaacccacctctgaagaagtagtggaaaatcctaccatacagaaggaagtcatagagtgtgacgtgaaaactaccgaagttgtaggcaatgtcatacttaaaccatcagatgaaggtgttaaagtaacacaagagttaggtcatgaggatcttatggctgcttatgtggaaaacacaagcattaccattaagaaacctaatgagctttcactagccttaggtttaaaaacaattgccactcatggtattgctgcaattaatagtgttccttggagtaaaattttggcttatgtcaaaccattcttaggacaagcagcaattacaacatcaaattgcgctaagagattagcacaacgtgtgtttaacaattatatgccttatgtgtttacattattgttccaattgtgtacttttactaaaagtaccaattctagaattagagcttcactacctacaactattgctaaaaatagtgttaagagtgttgctaaattatgtttggatgccggcattaattatgtgaagtcacccaaattttctaaattgttcacaatcgctatgtggctattgttgttaagtatttgcttaggttctctaatctgtgtaactgctgcttttggtgtactcttatctaattttggtgctccttcttattgtaatggcgttagagaattgtatcttaattcgtctaacgttactactatggatttctgtgaaggttcttttccttgcagcatttgtttaagtggattagactcccttgattcttatccagctcttgaaaccattcaggtgacgatttcatcgtacaagctagacttgacaattttaggtctggccgctgagtgggttttggcatatatgttgttcacaaaattcttttatttattaggtctttcagctataatgcaggtgttctttggctattttgctagtcatttcatcagcaattcttggctcatgtggtttatcattagtattgtacaaatggcacccgtttctgcaatggttaggatgtacatcttctttgcttctttctactacatatggaagagctatgttcatatcatggatggttgcacctcttcgacttgcatgatgtgctataagcgcaatcgtgccacacgcgttgagtgtacaactattgttaatggcatgaagagatctttctatgtctatgcaaatggaggccgtggcttctgcaagactcacaattggaattgtctcaattgtgacacattttgcactggtagtacattcattagtgatgaagttgctcgtgatttgtcactccagtttaaaagaccaatcaaccctactgaccagtcatcgtatattgttgatagtgttgctgtgaaaaatggcgcgcttcacctctactttgacaaggctggtcaaaagacctatgagagacatccgctctcccattttgtcaatttagacaatttgagagctaacaacactaaaggttcactgcctattaatgtcatagtttttgatggcaagtccaaatgcgacgagtctgcttctaagtctgcttctgtgtactacagtcagctgatgtgccaacctattctgttgcttgaccaagctcttgtatcagacgttggagatagtactgaagtttccgttaagatgtttgatgcttatgtcgacaccttttcagcaacttttagtgttcctatggaaaaacttaaggcacttgttgctacagctcacagcgagttagcaaagggtgtagctttagatggtgtcctttctacattcgtgtcagctgcccgacaaggtgttgttgataccgatgttgacacaaaggatgttattgaatgtctcaaactttcacatcactctgacttagaagtgacaggtgacagttgtaacaatttcatgctcacctataataaggttgaaaacatgacgcccagagatcttggcgcatgtattgactgtaatgcaaggcatatcaatgcccaagtagcaaaaagtcacaatgtttcactcatctggaatgtaaaagactacatgtctttatctgaacagctgcgtaaacaaattcgtagtgctgccaagaagaacaacataccttttagactaacttgtgctacaactagacaggttgtcaatgtcataactactaaaatctcactcaagggtggtaagattgttagtacttgttttaaacttatgcttaaggccacattattgtgcgttcttgctgcattggtttgttatatcgttatgccagtacatacattgtcaatccatgatggttacacaaatgaaatcattggttacaaagccattcaggatggtgtcactcgtgacatcatttctactgatgattgttttgcaaataaacatgctggttttgacgcatggtttagccagcgtggtggttcatacaaaaatgacaaaagctgccctgtagtagctgctatcattacaagagagattggtttcatagtgcctggcttaccgggtactgtgctgagagcaatcaatggtgacttcttgcattttctacctcgtgtttttagtgctgttggcaacatttgctacacaccttccaaactcattgagtatagtgattttgctacctctgcttgcgttcttgctgctgagtgtacaatttttaaggatgctatgggcaaacctgtgccatattgttatgacactaatttgctagagggttctatttcttatagtgagcttcgtccagacactcgttatgtgcttatggatggttccatcatacagtttcctaacacttacctggagggttctgttagagtagtaacaacttttgatgctgagtactgtagacatggtacatgcgaaaggtcagaagtaggtatttgcctatctaccagtggtagatgggttcttaataatgagcattacagagctctatcaggagttttctgtggtgttgatgcgatgaatctcatagctaacatctttactcctcttgtgcaacctgtgggtgctttagatgtgtctgcttcagtagtggctggtggtattattgccatattggtgacttgtgctgcctactactttatgaaattcagacgtgtttttggtgagtacaaccatgttgttgctgctaatgcacttttgtttttgatgtctttcactatactctgtctggtaccagcttacagctttctgccgggagtctactcagtcttttacttgtacttgacattctatttcaccaatgatgtttcattcttggctcaccttcaatggtttgccatgttttctcctattgtgcctttttggataacagcaatctatgtattctgtatttctctgaagcactgccattggttctttaacaactatcttaggaaaagagtcatgtttaatggagttacatttagtaccttcgaggaggctgctttgtgtacctttttgctcaacaaggaaatgtacctaaaattgcgtagcgagacactgttgccacttacacagtataacaggtatcttgctctatataacaagtacaagtatttcagtggagccttagatactaccagctatcgtgaagcagcttgctgccacttagcaaaggctctaaatgactttagcaactcaggtgctgatgttctctaccaaccaccacagacatcaatcacttctgctgttctgcagagtggttttaggaaaatggcattcccgtcaggcaaagttgaagggtgcatggtacaagtaacctgtggaactacaactcttaatggattgtggttggatgacacagtatactgtccaagacatgtcatttgcacagcagaagacatgcttaatcctaactatgaagatctgctcattcgcaaatccaaccatagctttcttgttcaggctggcaatgttcaacttcgtgttattggccattctatgcaaaattgtctgcttaggcttaaagttgatacttctaaccctaagacacccaagtataaatttgtccgtatccaacctggtcaaacattttcagttctagcatgctacaatggttcaccatctggtgtttatcagtgtgccatgagacctaatcataccattaaaggttctttccttaatggatcatgtggtagtgttggttttaacattgattatgattgcgtgtctttctgctatatgcatcatatggagcttccaacaggagtacacgctggtactgacttagaaggtaaattctatggtccatttgttgacagacaaactgcacaggctgcaggtacagacacaaccataacattaaatgttttggcatggctgtatgctgctgttatcaatggtgataggtggtttcttaatagattcaccactactttgaatgactttaaccttgtggcaatgaagtacaactatgaacctttgacacaagatcatgttgacatattgggacctctttctgctcaaacaggaattgccgtcttagatatgtgtgctgctttgaaagagctgctgcagaatggtatgaatggtcgtactatccttggtagcactattttagaagatgagtttacaccatttgatgttgttagacaatgctctggtgttaccttccaaggtaagttcaagaaaattgttaagggcactcatcattggatgcttttaactttcttgacatcactattgattcttgttcaaagtacacagtggtcactgtttttctttgtttacgagaatgctttcttgccatttactcttggtattatggcaattgctgcatgtgctatgctgcttgttaagcataagcacgcattcttgtgcttgtttctgttaccttctcttgcaacagttgcttactttaatatggtctacatgcctgctagctgggtgatgcgtatcatgacatggcttgaattggctgacactagcttgtctggttataggcttaaggattgtgttatgtatgcttcagctttagttttgcttattctcatgacagctcgcactgtttatgatgatgctgctagacgtgtttggacactgatgaatgtcattacacttgtttacaaagtctactatggtaatgctttagatcaagctatttccatgtgggccttagttatttctgtaacctctaactattctggtgtcgttacgactattatgtttttagctagagctatagtgtttgtgtgtgttgagtattacccattgttatttattactggcaacaccttacagtgtatcatgcttgtttattgtttcttaggctattgttgctgctgctactttggccttttctgtttactcaaccgttacttcaggcttactcttggtgtttatgactacttggtctctacacaagaatttaggtatatgaactcccaggggcttttgcctcctaagagtagtattgatgctttcaagcttaacattaagttgttgggtattggaggtaaaccatgtatcaaggttgctactgtacagtctaaaatgtctgacgtaaagtgcacatctgtggtactgctctcggttcttcaacaacttagagtagagtcatcttctaaattgtgggcacaatgtgtacaactccacaatgatattcttcttgcaaaagacacaactgaagctttcgagaagatggtttctcttttgtctgttttgctatccatgcagggtgctgtagacattaataggttgtgcgaggaaatgctcgataaccgtgctactcttcaggctattgcttcagaatttagttctttaccatcatatgccgcttatgccactgcccaggaggcctatgagcaggctgtagctaatggtgattctgaagtcgttctcaaaaagttaaagaaatctttgaatgtggctaaatctgagtttgaccgtgatgctgccatgcaacgcaagttggaaaagatggcagatcaggctatgacccaaatgtacaaacaggcaagatctgaggacaagagggcaaaagtaactagtgctatgcaaacaatgctcttcactatgcttaggaagcttgataatgatgcacttaacaacattatcaacaatgcgcgtgatggttgtgttccactcaacatcataccattgactacagcagccaaactcatggttgttgtccctgattatggtacctacaagaacacttgtgatggtaacacctttacatatgcatctgcactctgggaaatccagcaagttgttgatgcggatagcaagattgttcaacttagtgaaattaacatggacaattcaccaaatttggcttggcctcttattgttacagctctaagagccaactcagctgttaaactacagaataatgaactgagtccagtagcactacgacagatgtcctgtgcggctggtaccacacaaacagcttgtactgatgacaatgcacttgcctactataacaattcgaagggaggtaggtttgtgctggcattactatcagaccaccaagatctcaaatgggctagattccctaagagtgatggtacaggtacaatttacacagaactggaaccaccttgtaggtttgttacagacacaccaaaagggcctaaagtgaaatacttgtacttcatcaaaggcttaaacaacctaaatagaggtatggtgctgggcagtttagctgctacagtacgtcttcaggctggaaatgctacagaagtacctgccaattcaactgtgctttccttctgtgcttttgcagtagaccctgctaaagcatataaggattacctagcaagtggaggacaaccaatcaccaactgtgtgaagatgttgtgtacacacactggtacaggacaggcaattactgtaacaccagaagctaacatggaccaagagtcctttggtggtgcttcatgttgtctgtattgtagatgccacattgaccatccaaatcctaaaggattctgtgacttgaaaggtaagtacgtccaaatacctaccacttgtgctaatgacccagtgggttttacacttagaaacacagtctgtaccgtctgcggaatgtggaaaggttatggctgtagttgtgaccaactccgcgaacccttgatgcagtctgcggatgcatcaacgtttttaaacgggtttgcggtgtaagtgcagcccgtcttacaccgtgcggcacaggcactagtactgatgtcgtctacagggcttttgatatttacaacgaaaaagttgctggttttgcaaagttcctaaaaactaattgctgtcgcttccaggagaaggatgaggaaggcaatttattagactcttactttgtagttaagaggcatactatgtctaactaccaacatgaagagactatttataacttggttaaagattgtccagcggttgctgtccatgactttttcaagtttagagtagatggtgacatggtaccacatatatcacgtcagcgtctaactaaatacacaatggctgatttagtctatgctctacgtcattttgatgagggtaattgtgatacattaaaagaaatactcgtcacatacaattgctgtgatgatgattatttcaataagaaggattggtatgacttcgtagagaatcctgacatcttacgcgtatatgctaacttaggtgagcgtgtacgccaatcattattaaagactgtacaattctgcgatgctatgcgtgatgcaggcattgtaggcgtactgacattagataatcaggatcttaatgggaactggtacgatttcggtgatttcgtacaagtagcaccaggctgcggagttcctattgtggattcatattactcattgctgatgcccatcctcactttgactagggcattggctgctgagtcccatatggatgctgatctcgcaaaaccacttattaagtgggatttgctgaaatatgattttacggaagagagactttgtctcttcgaccgttattttaaatattgggaccagacataccatcccaattgtattaactgtttggatgataggtgtatccttcattgtgcaaactttaatgtgttattttctactgtgtttccacctacaagttttggaccactagtaagaaaaatatttgtagatggtgttccttttgttgtttcaactggataccattttcgtgagttaggagtcgtacataatcaggatgtaaacttacatagctcgcgtctcagtttcaaggaacttttagtgtatgctgctgatccagctatgcatgcagcttctggcaatttattgctagataaacgcactacatgcttttcagtagctgcactaacaaacaatgttgcttttcaaactgtcaaacccggtaattttaataaagacttttatgactttgctgtgtctaaaggtttctttaaggaaggaagttctgttgaactaaaacacttcttctttgctcaggatggcaacgctgctatcagtgattatgactattatcgttataatctgccaacaatgtgtgatatcagacaactcctattcgtagttgaagttgttgataaatactttgattgttacgatggtggctgtattaatgccaaccaagtaatcgttaacaatctggataaatcagctggtttcccatttaataaatggggtaaggctagactttattatgactcaatgagttatgaggatcaagatgcacttttcgcgtatactaagcgtaatgtcatccctactataactcaaatgaatcttaagtatgccattagtgcaaagaatagagctcgcaccgtagctggtgtctctatctgtagtactatgacaaatagacagtttcatcagaaattattgaagtcaatagccgccactagaggagctactgtggtaattggaacaagcaagttttacggtggctggcataatatgttaaaaactgtttacagtgatgtagaaactccacaccttatgggttgggattatccaaaatgtgacagagccatgcctaacatgcttaggataatggcctctcttgttcttgctcgcaaacataacacttgctgtaacttatcacaccgtttctacaggttagctaacgagtgtgcgcaagtattaagtgagatggtcatgtgtggcggctcactatatgttaaaccaggtggaacatcatccggtgatgctacaactgcttatgctaatagtgtctttaacatttgtcaagctgttacagccaatgtaaatgcacttctttcaactgatggtaataagatagctgacaagtatgtccgcaatctacaacacaggctctatgagtgtctctatagaaatagggatgttgatcatgaattcgtggatgagttttacgcttacctgcgtaaacatttctccatgatgattctttctgatgatgccgttgtgtgctataacagtaactatgcggctcaaggtttagtagctagcattaagaactttaaggcagttctttattatcaaaataatgtgttcatgtctgaggcaaaatgttggactgagactgaccttactaaaggacctcacgaattttgctcacagcatacaatgctagttaaacaaggagatgattacgtgtacctgccttacccagatccatcaagaatattaggcgcaggctgttttgtcgatgatattgtcaaaacagatggtacacttatgattgaaaggttcgtgtcactggctattgatgcttacccacttacaaaacatcctaatcaggagtatgctgatgtctttcacttgtatttacaatacattagaaagttacatgatgagcttactggccacatgttggacatgtattccgtaatgctaactaatgataacacctcacggtactgggaacctgagttttatgaggctatgtacacaccacatacagtcttgcaggctgtaggtgcttgtgtattgtgcaattcacagacttcacttcgttgcggtgcctgtattaggagaccattcctatgttgcaagtgctgctatgaccatgtcatttcaacatcacacaaattagtgttgtctgttaatccctatgtttgcaatgccccaggttgtgatgtcactgatgtgacacaactgtatctaggaggtatgagctattattgcaagtcacataagcctcccattagttttccattatgtgctaatggtcaggtttttggtttatacaaaaacacatgtgtaggcagtgacaatgtcactgacttcaatgcgatagcaacatgtgattggactaatgctggcgattacatacttgccaacacttgtactgagagactcaagcttttcgcagcagaaacgctcaaagccactgaggaaacatttaagctgtcatatggtattgccactgtacgcgaagtactctctgacagagaattgcatctttcatgggaggttggaaaacctagaccaccattgaacagaaactatgtctttactggttaccgtgtaactaaaaatagtaaagtacagattggagagtacacctttgaaaaaggtgactatggtgatgctgttgtgtacagaggtactacgacatacaagttgaatgttggtgattactttgtgttgacatctcacactgtaatgccacttagtgcacctactctagtgccacaagagcactatgtgagaattactggcttgtacccaacactcaacatctcagatgagttttctagcaatgttgcaaattatcaaaaggtcggcatgcaaaagtactctacactccaaggaccacctggtactggtaagagtcattttgccatcggacttgctctctattacccatctgctcgcatagtgtatacggcatgctctcatgcagctgttgatgccctatgtgaaaaggcattaaaatatttgcccatagataaatgtagtagaatcatacctgcgcgtgcgcgcgtagagtgttttgataaattcaaagtgaattcaacactagaacagtatgttttctgcactgtaaatgcattgccagaaacaactgctgacattgtagtctttgatgaaatctctatggctactaattatgacttgagtgttgtcaatgctagacttcgtgcaaaacactacgtctatattggcgatcctgctcaattaccagccccccgcacattgctgactaaaggcacactagaaccagaatattttaattcagtgtgcagacttatgaaaacaataggtccagacatgttccttggaacttgtcgccgttgtcctgctgaaattgttgacactgtgagtgctttagtttatgacaataagctaaaagcacacaaggataagtcagctcaatgcttcaaaatgttctacaaaggtgttattacacatgatgtttcatctgcaatcaacagacctcaaataggcgttgtaagagaatttcttacacgcaatcctgcttggagaaaagctgtttttatctcaccttataattcacagaacgctgtagcttcaaaaatcttaggattgcctacgcagactgttgattcatcacagggttctgaatatgactatgtcatattcacacaaactactgaaacagcacactcttgtaatgtcaaccgcttcaatgtggctatcacaagggcaaaaattggcattttgtgcataatgtctgatagagatctttatgacaaactgcaatttacaagtctagaaataccacgtcgcaatgtggctacattacaagcagaaaatgtaactggactttttaaggactgtagtaagatcattactggtcttcatcctacacaggcacctacacacctcagcgttgatataaagttcaagactgaaggattatgtgttgacataccaggcataccaaaggacatgacctaccgtagactcatctctatgatgggtttcaaaatgaattaccaagtcaatggttaccctaatatgtttatcacccgcgaagaagctattcgtcacgttcgtgcgtggattggctttgatgtagagggctgtcatgcaactagagatgctgtgggtactaacctacctctccagctaggattttctacaggtgttaacttagtagctgtaccgactggttatgttgacactgaaaataacacagaattcaccagagttaatgcaaaacctccaccaggtgaccagtttaaacatcttataccactcatgtataaaggcttgccctggaatgtagtgcgtattaagatagtacaaatgctcagtgatacactgaaaggattgtcagacagagtcgtgttcgtcctttgggcgcatggctttgagcttacatcaatgaagtactttgtcaagattggacctgaaagaacgtgttgtctgtgtgacaaacgtgcaacttgcttttctacttcatcagatacttatgcctgctggaatcattctgtgggttttgactatgtctataacccatttatgattgatgttcagcagtggggctttacgggtaaccttcagagtaaccatgaccaacattgccaggtacatggaaatgcacatgtggctagttgtgatgctatcatgactagatgtttagcagtccatgagtgctttgttaagcgcgttgattggtctgttgaataccctattataggagatgaactgagggttaattctgcttgcagaaaagtacaacacatggttgtgaagtctgcattgcttgctgataagtttccagttcttcatgacataggaaatccaaaggctatcaagtgtgtgcctcaggctgaagtagaatggaagttctacgatgctcagccatgtagtgacaaagcttacaaaatagaggaactcttctattcttatgctatacatcacgataaattcactgatggtgtttgtttgttttggaattgtaacgttgatcgttacccagccaatgcaattgtgtgtaggtttgacacaagagtcttgtcaaacttgaacttaccaggctgtgatggtggtagtttgtatgtgaataagcatgcattccacactccagctttcgataaaagtgcatttactaatttaaagcaattgcctttcttttactattctgatagtccttgtgagtctcatggcaaacaagtagtgtcggatattgattatgttccactcaaatctgctacgtgtattacacgatgcaatttaggtggtgctgtttgcagacaccatgcaaatgagtaccgacagtacttggatgcatataatatgatgatttctgctggatttagcctatggatttacaaacaatttgatacttataacctgtggaatacatttaccaggttacagagtttagaaaatgtggcttataatgttgttaataaaggacactttgatggacacgccggcgaagcacctgtttccatcattaataatgctgtttacacaaaggtagatggtattgatgtggagatctttgaaaataagacaacacttcctgttaatgttgcatttgagctttgggctaagcgtaacattaaaccagtgccagagattaagatactcaataatttgggtgttgatatcgctgctaatactgtaatctgggactacaaaagagaagccccagcacatgtatctacaataggtgtctgcacaatgactgacattgccaagaaacctactgagagtgcttgttcttcacttactgtcttgtttgatggtagagtggaaggacaggtagacctttttagaaacgcccgtaatggtgttttaataacagaaggttcagtcaaaggtctaacaccttcaaagggaccagcacaagctagcgtcaatggagtcacattaattggagaatcagtaaaaacacagtttaactactttaagaaagtagacggcattattcaacagttgcctgaaacctactttactcagagcagagacttagaggattttaagcccagatcacaaatggaaactgactttctcgagctcgctatggatgaattcatacagcgatataagctcgagggctatgccttcgaacacatcgtttatggagatttcagtcatggacaacttggcggtcttcatttaatgataggcttagccaagcgctcacaagattcaccacttaaattagaggattttatccctatggacagcacagtgaaaaattacttcataacagatgcgcaaacaggttcatcaaaatgtgtgtgttctgtgattgatcttttacttgatgactttgtcgagataataaagtcacaagatttgtcagtgatttcaaaagtggtcaaggttacaattgactatgctgaaatttcattcatgctttggtgtaaggatggacatgttgaaaccttctacccaaaactacaagcaagtcaagcgtggcaaccaggtgttgcgatgcctaacttgtacaagatgcaaagaatgcttcttgaaaagtgtgaccttcagaattatggtgaaaatgctgttataccaaaaggaataatgatgaatgtcgcaaagtatactcaactgtgtcaatacttaaatacacttactttagctgtaccctacaacatgagagttattcactttggtgctggctctgataaaggagttgcaccaggtacagctgtgctcagacaatggttgccaactggcacactacttgtcgattcagatcttaatgacttcgtctccgacgcagattctactttaattggagactgtgcaacagtacatacggctaataaatgggaccttattattagcgatatgtatgaccctaggaccaaacatgtgacaaaagagaatgactctaaagaagggtttttcacttatctgtgtggatttataaagcaaaaactagccctgggtggttctatagctgtaaagataacagagcattcttggaatgctgacctttacaagcttatgggccatttctcatggtggacagcttttgttacaaatgtaaatgcatcatcatcggaagcatttttaattggggctaactatcttggcaagccgaaggaacaaattgatggctataccatgcatgctaactacattttctggaggaacacaaatcctatccagttgtcttcctattcactctttgacatgagcaaatttcctcttaaattaagaggaactgctgtaatgtctcttaaggagaatcaaatcaatgatatgatttattctcttctggaaaaaggtaggcttatcattagagaaaacaacagagttgtggtttcaagtgatattcttgttaacaactaaacgaacatgtttattttcttattatttcttactctcactagtggtagtgaccttgaccggtgcaccacttttgatgatgttcaagctcctaattacactcaacatacttcatctatgaggggggtttactatcctgatgaaatttttagatcagacactctttatttaactcaggatttatttcttccattttattctaatgttacagggtttcatactattaatcatacgtttggcaaccctgtcataccttttaaggatggtatttattttgctgccacagagaaatcaaatgttgtccgtggttgggtttttggttctaccatgaacaacaagtcacagtcggtgattattattaacaattctactaatgttgttatacgagcatgtaactttgaattgtgtgacaaccctttctttgctgtttctaaacccatgggtacacagacacatactatgatattcgataatgcatttaattgcactttcgagtacatatctgatgccttttcgcttgatgtttcagaaaagtcaggtaattttaaacacttacgagagtttgtgtttaaaaataaagatgggtttctctatgtttataagggctatcaacctatagatgtagttcgtgatctaccttctggttttaacactttgaaacctatttttaagttgcctcttggtattaacattacaaattttagagccattcttacagccttttcacctgctcaagacatttggggcacgtcagctgcagcctattttgttggctatttaaagccaactacatttatgctcaagtatgatgaaaatggtacaatcacagatgctgttgattgttctcaaaatccacttgctgaactcaaatgctctgttaagagctttgagattgacaaaggaatttaccagacctctaatttcagggttgttccctcaggagatgttgtgagattccctaatattacaaacttgtgtccttttggagaggtttttaatgctactaaattcccttctgtctatgcatgggagagaaaaaaaatttctaattgtgttgctgattactctgtgctctacaactcaacatttttttcaacctttaagtgctatggcgtttctgccactaagttgaatgatctttgcttctccaatgtctatgcagattcttttgtagtcaagggagatgatgtaagacaaatagcgccaggacaaactggtgttattgctgattataattataaattgccagatgatttcatgggttgtgtccttgcttggaatactaggaacattgatgctacttcaactggtaattataattataaatataggtatcttagacatggcaagcttaggccctttgagagagacatatctaatgtgcctttctcccctgatggcaaaccttgcaccccacctgctcttaattgttattggccattaaatgattatggtttttacaccactactggcattggctaccaaccttacagagttgtagtactttcttttgaacttttaaatgcaccggccacggtttgtggaccaaaattatccactgaccttattaagaaccagtgtgtcaattttaattttaatggactcactggtactggtgtgttaactccttcttcaaagagatttcaaccatttcaacaatttggccgtgatgtttctgatttcactgattccgttcgagatcctaaaacatctgaaatattagacatttcaccttgctcttttgggggtgtaagtgtaattacacctggaacaaatgcttcatctgaagttgctgttctatatcaagatgttaactgcactgatgtttctacagcaattcatgcagatcaactcacaccagcttggcgcatatattctactggaaacaatgtattccagactcaagcaggctgtcttataggagctgagcatgtcgacacttcttatgagtgcgacattcctattggagctggcatttgtgctagttaccatacagtttctttattacgtagtactagccaaaaatctattgtggcttatactatgtctttaggtgctgatagttcaattgcttactctaataacaccattgctatacctactaacttttcaattagcattactacagaagtaatgcctgtttctatggctaaaacctccgtagattgtaatatgtacatctgcggagattctactgaatgtgctaatttgcttctccaatatggtagcttttgcacacaactaaatcgtgcactctcaggtattgctgctgaacaggatcgcaacacacgtgaagtgttcgctcaagtcaaacaaatgtacaaaaccccaactttgaaatattttggtggttttaatttttcacaaatattacctgaccctctaaagccaactaagaggtcttttattgaggacttgctctttaataaggtgacactcgctgatgctggcttcatgaagcaatatggcgaatgcctaggtgatattaatgctagagatctcatttgtgcgcagaagttcaatggacttacagtgttgccacctctgctcactgatgatatgattgctgcctacactgctgctctagttagtggtactgccactgctggatggacatttggtgctggcgctgctcttcaaataccttttgctatgcaaatggcatataggttcaatggcattggagttacccaaaatgttctctatgagaaccaaaaacaaatcgccaaccaatttaacaaggcgattagtcaaattcaagaatcacttacaacaacatcaactgcattgggcaagctgcaagacgttgttaaccagaatgctcaagcattaaacacacttgttaaacaacttagctctaattttggtgcaatttcaagtgtgctaaatgatatcctttcgcgacttgataaagtcgaggcggaggtacaaattgacaggttaattacaggcagacttcaaagccttcaaacctatgtaacacaacaactaatcagggctgctgaaatcagggcttctgctaatcttgctgctactaaaatgtctgagtgtgttcttggacaatcaaaaagagttgacttttgtggaaagggctaccaccttatgtccttcccacaagcagccccgcatggtgttgtcttcctacatgtcacgtatgtgccatcccaggagaggaacttcaccacagcgccagcaatttgtcatgaaggcaaagcatacttccctcgtgaaggtgtttttgtgtttaatggcacttcttggtttattacacagaggaacttcttttctccacaaataattactacagacaatacatttgtctcaggaaattgtgatgtcgttattggcatcattaacaacacagtttatgatcctctgcaacctgagcttgactcattcaaagaagagctggacaagtacttcaaaaatcatacatcaccagatgttgattttggcgacatttcaggcattaacgcttctgtcgtcaacattcaaaaagaaattgaccgcctcaatgaggtcgctaaaaatttaaatgaatcactcattgaccttcaagaattgggaaaatatgagcaatatattaaatggccttggtatgtttggctcggcttcattgctggactaattgccatcgtcatggttacaatcttgctttgttgcatgactagttgttgcagttgcctcaagggtgcatgctcttgtggttcttgctgcaagtttgatgaggatgactctgagccagttctcaagggtgtcaaattacattacacataaacgaacttatggatttgtttatgagattttttactcttggatcaattactgcacagccagtaaaaattgacaatgcttctcctgcaagtactgttcatgctacagcaacgataccgctacaagcctcactccctttcggatggcttgttattggcgttgcatttcttgctgtttttcagagcgctaccaaaataattgcgctcaataaaagatggcagctagccctttataagggcttccagttcatttgcaatttactgctgctatttgttaccatctattcacatcttttgcttgtcgctgcaggtatggaggcgcaatttttgtacctctatgccttgatatattttctacaatgcatcaacgcatgtagaattattatgagatgttggctttgttggaagtgcaaatccaagaacccattactttatgatgccaactactttgtttgctggcacacacataactatgactactgtataccatataacagtgtcacagatacaattgtcgttactgaaggtgacggcatttcaacaccaaaactcaaagaagactaccaaattggtggttattctgaggataggcactcaggtgttaaagactatgtcgttgtacatggctatttcaccgaagtttactaccagcttgagtctacacaaattactacagacactggtattgaaaatgctacattcttcatctttaacaagcttgttaaagacccaccgaatgtgcaaatacacacaatcgacggctcttcaggagttgctaatccagcaatggatccaatttatgatgagccgacgacgactactagcgtgcctttgtaagcacaagaaagtgagtacgaacttatgtactcattcgtttcggaagaaacaggtacgttaatagttaatagcgtacttctttttcttgctttcgtggtattcttgctagtcacactagccatccttactgcgcttcgattgtgtgcgtactgctgcaatattgttaacgtgagtttagtaaaaccaacggtttacgtctactcgcgtgttaaaaatctgaactcttctgaaggagttcctgatcttctggtctaaacgaactaactattattattattctgtttggaactttaacattgcttatcatggcagacaacggtactattaccgttgaggagcttaaacaactcctggaacaatggaacctagtaataggtttcctattcctagcctggattatgttactacaatttgcctattctaatcggaacaggtttttgtacataataaagcttgttttcctctggctcttgtggccagtaacacttgcttgttttgtgcttgctgttgtctacagaattaattgggtgactggcgggattgcgattgcaatggcttgtattgtaggcttgatgtggcttagctacttcgttgcttccttcaggctgtttgctcgtacccgctcaatgtggtcattcaacccagaaacaaacattcttctcaatgtgcctctccgggggacaattgtgaccagaccgctcatggaaagtgaacttgtcattggtgctgtgatcattcgtggtcacttgcgaatggccggacactccctagggcgctgtgacattaaggacctgccaaaagagatcactgtggctacatcacgaacgctttcttattacaaattaggagcgtcgcagcgtgtaggcactgattcaggttttgctgcatacaaccgctaccgtattggaaactataaattaaatacagaccacgccggtagcaacgacaatattgctttgctagtacagtaagtgacaacagatgtttcatcttgttgacttccaggttacaatagcagagatattgattatcattatgaggactttcaggattgctatttggaatcttgacgttataataagttcaatagtgagacaattatttaagcctctaactaagaagaattattcggagttagatgatgaagaacctatggagttagattatccataaaacgaacatgaaaattattctcttcctgacattgattgtatttacatcttgcgagctatatcactatcaggagtgtgttagaggtacgactgtactactaaaagaaccttgcccatcaggaacatacgagggcaattcaccatttcaccctcttgctgacaataaatttgcactaacttgcactagcacacactttgcttttgcttgtgctgacggtactcgacatacctatcagctgcgtgcaagatcagtttcaccaaaacttttcatcagacaagaggaggttcaacaagagctctactcgccactttttctcattgttgctgctctagtatttttaatactttgcttcaccattaagagaaagacagaatgaatgagctcactttaattgacttctatttgtgctttttagcctttctgctattccttgttttaataatgcttattatattttggttttcactcgaaatccaggatctagaagaaccttgtaccaaagtctaaacgaacatgaaacttctcattgttttgacttgtatttctctatgcagttgcatatgcactgtagtacagcgctgtgcatctaataaacctcatgtgcttgaagatccttgtaaggtacaacactaggggtaatacttatagcactgcttggctttgtgctctaggaaaggttttaccttttcatagatggcacactatggttcaaacatgcacacctaatgttactatcaactgtcaagatccagctggtggtgcgcttatagctaggtgttggtaccttcatgaaggtcaccaaactgctgcatttagagacgtacttgttgttttaaataaacgaacaaattaaaatgtctgataatggaccccaatcaaaccaacgtagtgccccccgcattacatttggtggacccacagattcaactgacaataaccagaatggaggacgcaatggggcaaggccaaaacagcgccgaccccaaggtttacccaataatattgcgtcttggttcacagctctcactcagcatggcaaggaggaacttagattccctcgaggccagggcgttccaatcaacaccaatagtggtccagatgaccaaattggctactaccgaagagctacccgacgagttcgtggtggtgacggcaaaatgaaagagctcagccccagatggtacttctattacctaggaactggcccagaagcttcacttccctacggcgctaacaaagaaggcatcgtatgggttgcaactgagggagccttgaatacacccaaagaccacattggcacccgcaatcctaataacaatgctgccaccgtgctacaacttcctcaaggaacaacattgccaaaaggcttctacgcagagggaagcagaggcggcagtcaagcctcttctcgctcctcatcacgtagtcgcggtaattcaagaaattcaactcctggcagcagtaggggaaattctcctgctcgaatggctagcggaggtggtgaaactgccctcgcgctattgctgctagacagattgaaccagcttgagagcaaagtttctggtaaaggccaacaacaacaaggccaaactgtcactaagaaatctgctgctgaggcatctaaaaagcctcgccaaaaacgtactgccacaaaacagtacaacgtcactcaagcatttgggagacgtggtccagaacaaacccaaggaaatttcggggaccaagacctaatcagacaaggaactgattacaaacattggccgcaaattgcacaatttgctccaagtgcctctgcattctttggaatgtcacgcattggcatggaagtcacaccttcgggaacatggctgacttatcatggagccattaaattggatgacaaagatccacaattcaaagacaacgtcatactgctgaacaagcacattgacgcatacaaaacattcccaccaacagagcctaaaaaggacaaaaagaaaaagactgatgaagctcagcctttgccgcagagacaaaagaagcagcccactgtgactcttcttcctgcggctgacatggatgatttctccagacaacttcaaaattccatgagtggagcttctgctgattcaactcaggcataaacactcatgatgaccacacaaggcagatgggctatgtaaacgttttcgcaattccgtttacgatacatagtctactcttgtgcagaatgaattctcgtaactaaacagcacaagtaggtttagttaactttaatctcacatagcaatctttaatcaatgtgtaacattagggaggacttgaaagagccaccacattttcatcgaggccacgcggagtacgatcgagggtacagtgaataatgctagggagagctgcctatatggaagagccctaatgtgtaaaattaattttagtagtgctatccccatgtgattttaatagcttcttaggagaatgac

SEQ ID NO: 59 - DNA, 29757 bp, Coronavirus
tacccaggaaaagccaaccaacctcgatctcttgtagatctgttctctaaacgaactttaaaatctgtgtagctgtcgctcggctgcatgcctagtgcacctacgcagtataaacaataataaattttactgtcgttgacaagaaacgagtaactcgtccctcttctgcagactgcttacggtttcgtccgtgttgcagtcgatcatcagcatacctaggtttcgtccgggtgtgaccgaaaggtaagatggagagccttgttcttggtgtcaacgagaaaacacacgtccaactcagtttgcctgtccttcaggttagagacgtgctagtgcgtggcttcggggactctgtggaagaggccctatcggaggcacgtgaacacctcaaaaatggcacttgtggtctagtagagctggaaaaaggcgtactgccccagcttgaacagccctatgtgttcattaaacgttctgatgccttaagcaccaatcactgccacaaggtcgttgagctggttgcagaaatggacggcattcagtacggtcgtagcggtataacactgggagtactcgtgccacatgtgggcgaaaccccaattgcataccgcaatgttcttcttcgtaagaacggtaataagagagccggtggtcatagctatggcatcgatctaaagtcttatgacttaggtgacgagcttggcactgatcccattgaagattatgaacaaaactggaacactaagcatggcagtggtgcactccgtgaactcactcgtgagctcaatggaggtgcagtcactcgctatgtcgacaacaatttctgtggcccagatgggtaccctcttgattgcatcaaagattttctcgcacgcgcgggcaagtcaatgtgcactctttccgaacaacttgattacatcgagtcgcagagaggtgtctactgctgccgtgaccatgagcatgaaattgcctggttcactgagcgctctgataagagctacgagcaccagacacccttcgaaattaagagtgccaagaaatttgacactttcaaaggggaatgcccaaagtttgtgtttcctcttaactcaaaagtcaaagtcattcaaccacgtgttgaaaagaaaaagactgagggtttcatggggcgtatacgctctgtgtaccctgttgcatctccacaggagtgtaacaatatgcacttgtctaccttgatgaaatgtaatcattgcgatgaagtttcatggcagacgtgcgactttctgaaagccacttgtgaacattgtggcactgaaaatttagttattgaaggacctactacatgtgggtacctacctactaatgctgtagtgaaaatgccatgtcctgcctgtcaagacccagagattggacctgagcatagtgttgcagattatcacaaccactcaaacattgaaactcgactccgcaagggaggtaggactagatgttttggaggctgtgtgtttgcctatgttggctgctataataagcgtgcctactgggttcctcgtgctagtgctgatattggctcaggccatactggcattactggtgacaatgtggagaccttgaatgaggatctccttgagatactgagtcgtgaacgtgttaacattaacattgttggcgattttcatttgaatgaagaggttgccatcattttggcatctttctctgcttctacaagtgcctttattgacactataaagagtcttgattacaagtctttcaaaaccattgttgagtcctgcggtaactataaagttaccaagggaaagcccgtaaaaggtgcttggaacattggacaacagagatcagttttaacaccactgtgtggttttccctcacaggctgctggtgttatcagatcaatttttgcgcgcacacttgatgcagcaaaccactcaattcctgatttgcaaagagcagctgtcaccatacttgatggtatttctgaacagtcattacgtcttgtcgacgccatggtttatacttcagacctgctcaccaacagtgtcattattatggcatatgtaactggtggtcttgtacaacagacttctcagtggttgtctaatcttttgggcactactgttgaaaaactcaggcctatctttgaatggattgaggcgaaacttagtgcaggagttgaatttctcaaggatgcttgggagattctcaaatttctcattacaggtgtttttgacatcgtcaagggtcaaatacaggttgcttcagataacatcaaggattgtgtaaaatgcttcattgatgttgttaacaaggcactcgaaatgtgcattgatcaagtcactatcgctggcgcaaagttgcgatcactcaacttaggtgaagtcttcatcgctcaaagcaagggactttaccgtcagtgtatacgtggcaaggagcagctgcaactactcatgcctcttaaggcaccaaaagaagtaacctttcttgaaggtgattcacatgacacagtacttacctctgaggaggttgttctcaagaacggtgaactcgaagcactcgagacgcccgttgatagcttcacaaatggagctatcgttggcacaccagtctgtgtaaatggcctcatgctcttagagattaaggacaaagaacaatactgcgcattgtctcctggtttactggctacaaacaatgtctttcgcttaaaagggggtgcaccaattaaaggtgtaacctttggagaagatactgtttgggaagttcaaggttacaagaatgtgagaatcacatttgagcttgatgaacgtgttgacaaagtgcttaatgaaaagtgctctgtctacactgttgaatccggtaccgaagttactgagtttgcatgtgttgtagcagaggctgttgtgaagactttacaaccagtttctgatctccttaccaacatgggtattgatcttgatgagtggagtgtagctacattctacttatttgatgatgctggtgaagaaaacttttcatcacgtatgtattgttccttttaccctccagatgaggaagaagaggacgatgcagagtgtgaggaagaagaaattgatgaaacctgtgaacatgagtacggtacagaggatgattatcaaggtctccctctggaatttggtgcctcagctgaaacagttcgagttgaggaagaagaagaggaagactggctggatgatactactgagcaatcagagattgagccagaaccagaacctacacctgaagaaccagttaatcagtttactggttatttaaaacttactgacaatgttgccattaaatgtgttgacatcgttaaggaggcacaaagtgctaatcctatggtgattgtaaatgctgctaacatacacctgaaacatggtggtggtgtagcaggtgcactcaacaaggcaaccaatggtgccatgcaaaaggagagtgatgattacattaagctaaatggccctcttacagtaggagggtcttgtttgctttctggacataatcttgctaagaagtgtctgcatgttgttggacctaacctaaatgcaggtgaggacatccagcttcttaaggcagcatatgaaaatttcaattcacaggacaccttacttgcaccattgttgtcagcaggcatatttggtgctaaaccacttcagtctttacaagtgtgcgtgcagacggttcgtacacaggtttatattgcagtcaatgacaaagctctttatgagcaggttgtcatggattatcttgataacctgaagcctagagtggaagcacctaaacaagaggagccaccaaacacagaagattccaaaactgaggagaaatctgtcgtacagaagcctgtcgatgtgaagccaaaaattaaggcctgcattgatgaggttaccacaacactggaagaaactaagtttcttaccaataagttactcttgtttgctgatatcaatggtaagctttaccatgattctcagaacatgcttagaggtgaagatatgtctttccttgagaaggatgcaccttacatggtaggtgatgttatcactagtggtgatatcacttgtgttgtaataccctccaaaaaggctggtggcactactgagatgctctcaagagctttgaagaaagtgccagttgatgagtatataaccacgtaccctggacaaggatgtgctggttatacacttgaggaagctaggactgctcttaagaaatgcaaatctgcatcttatgtactaccttcagaagcacctaatgctaaggaagagattctaggaactgtatcctggaatttgagagaaatgcttgctcatgctgaagagacaagaaaattaatgcctatatgcatggatgttagagccataatggcaaccatccaacgtaagtataaaggaattaaaattcaagagggcatcgttgactatggtgtccgattcttcttttatactagtaaagagcctgtagcttctattattacgaagctgaactctctaaatgagccgcttgtcacaatgccaattggttatgtgacacatggttttaatcttgaagaggctgcgcgctgtatgcgttctcttaaagctcctgccgtagtgtcagtatcatcaccagatgctgttactacatataatggatacctcacttcgtcatcaaagacatctgaggagcactttgtagaaacagtttctttggctggctcttacagagattggtcctattcaggacagcgtacagagttaggtgttgaatttcttaagcgtggtgacaaaattgtgtaccacactctggagagccccgtcgagtttcatcttgacggtgaggttctttcacttgacaaactaaagagtctcttaaccctgcgggaggttaagactataaaagtgttcacaactgtggacaacactaatctccacacacagcttgtggatatgtctatgacatatggacagcagtttggtccaacatacttggatggtgctgatgttacaaaaattaaacctcatgtaaatcatgagggtaagactttctttgtactacctagtgatgacacactacgtagtgaagctttcgagtactaccatactcttgatgagagttttcttggtaggtacatgtctgctttaaaccacacaaagaaatggaaatttcctcaagttggtggtttaacttcaattaaatgggctgataacaattgttatttgtctagtgttttattagcacttcaacagcttgaagtcaaattcaatgcaccagcacttcaagaggcttattatagagcccgtgctggtgatgctgctaacttttgtgcactcatactcgcttacagtaataaaactgttggcgagcttggtgatgtcagagaaactatgacccatcttctacagcatgctaatttggaatctgcaaagcgagttcttaatgtggtgtgtaaacattgtggtcagaaaactactaccttaacgggtgtagaagctgtgatgtatatgggtactctatcttatgataatcttaagacaggtgtttccattccatgtgtgtgtggtcgtgatgctacacaatatctagtacaacaagagtcttcttttgttatgatgtctgcaccacctgctgagtataaattacagcaaggtacattcttatgtgcgaatgagtacactggtaactatcagtgtggtcattacactcatataactgctaaggagaccctctatcgtattgacggagctcaccttacaaagatgtcagagtacaaaggaccagtgactgatgttttctacaaggaaacatcttacactacaaccatcaagcctgtgtcgtataaactcgatggagttacttacacagagattgaaccaaaattggatgggtattataaaaaggataatgcttactatacagagcagcctatagaccttgtaccaactcaaccattaccaaatgcgagttttgataatttcaaactcacatgttctaacacaaaatttgctgatgatttaaatcaaatgacaggcttcacaaagccagcttcacgagagctatctgtcacattcttcccagacttgaatggcgatgtagtggctattgactatagacactattcagcgagtttcaagaaaggtgctaaattactgcataagccaattgtttggcacattaaccaggctacaaccaagacaacgttcaaaccaaacacttggtgtttacgttgtctttggagtacaaagccagtagatacttcaaattcatttgaagttctggcagtagaagacacacaaggaatggacaatcttgcttgtgaaagtcaacaacccacctctgaagaagtagtggaaaatcctaccatacagaaggaagtcatagagtgtgacgtgaaaactaccgaagttgtaggcaatgtcatacttaaaccatcagatgaaggtgttaaagtaacacaagagttaggtcatgaggatcttatggctgcttatgtggaaaacacaagcattaccattaagaaacctaatgagctttcactagccttaggtttaaaaacaattgccactcatggtattgctgcaattaatagtgttccttggagtaaaatttttgcttatgtcaaaccattcttaggacaagcagcaattacaacatcaaattgcgctaagagattagcacaacgtgtgtttaacaattatatgccttatgtgtttacattattgttccaattgtgtacttttactaaaagtaccaattctagaattagagcttcactacctacaactattgctaaaaatagtgttaagagtgttgctaaattatgtttggatgccggcattaattatgtgaagtcacccaaattttctaaattgttcacaatcgctatgtggctattgttgttaagtatttgcttaggttctctaatctatgtaactgctgcttttggtgtactcttatctaattttggtgctccttcttattgtaatggcgttagagaattgtatcttaattcgtctaacgttactactatggatttctgtgaaggttcttttccttgcagcatttgtttaagtggattagactcccttgattcttatccagctcttgaaaccattcaggtgacgatttcatcgtacaagctagacttgacaattttaggtctggccgctgagtgggttttggcatatatgttgttcacaaaattcttttatttattaggtctttcagctataatgcaggtgttctttggctattttgctagtcatttcatcagcaattcttggctcatgtggtttatcattagtattgtacaaatggcacccgtttctgcaatggttaggatgtacatcttctttgcttctttctactacatatggaagagctatgttcatatcatggatggttgcacctcttcgacttgcatgatgtgctataagcgcaatcgtgccacacgcgttgagtgtacaactattgttaatggcatgaagagatctttctatgtctatgcaaatggaggccgtggcttctgcaagactcacaattggaattgtctcaattgtgacacattttgcactggtagtacattcattagtgatgaagttgctcgtgatttgtcactccagtttaaaagaccaatcaaccctactgaccagtcatcgtatattgttgatagtgttgctgtgaaaaatggcgcgcttcacctctactttgacaaggctggtcaaaagacctatgagagacatccgctctcccattttgtcaatttagacaatttgagagctaacaacactaaaggttcactgcctattaatgtcatagtttttgatggcaagtccaaatgcgacgagtctgcttctaagtctgcttctgtgtactacagtcagctgatgtgccaacctattctgttgcttgaccaagctcttgtatcagacgttggagatagtactgaagttcccgttaagatgtttgatgcttatgtcgacaccttttcagcaacttttagtgttcctatggaaaaacttaaggcacttgttgctacagctcacagcgagttagcaaagggtgtagctttagatggtgtcctttctacattcgtgtcagctgcccgacaaggtgttgttgataccgatgttgacacaaaggatgttattgaatgtctcaaactttcacatcactctgacttagaagtgacaggtgacagttgtaacaatttcatgctcacctataataaggttgaaaacatgacgcccagagatcttggcgcatgtattgactgtaatgcaaggcatatcaatgcccaagtagcaaaaagtcacaatgtttcactcatctggaatgtaaaagactacatgtctttatctgaacagctgcgtaaacaaattcgtagtgctgccaagaagaacaacataccttttagactaacttgtgctacaactagacaggttgtcaatgtcataactactaaaatctcactcaagggtggtaagattgttagtacttgttttaaacttatgcttaaggccacattattgtgcgttcttgctgcattggtttgttacatcgttatgccagtacatacattgtcaatccatgatggttacacaaatgaaatcattggttacaaagccattcaggatggtgtcactcgtgacatcatttctactgatgattgttttgcaaataaacatgctggttttgacgcatggtttagccagcgtggtggttcatacaaaaatgacaaaagctgccctgtagtagctgctatcattacaagagagattggtttcatagtgcctggcttaccgggtactgtgttgagagcaatcaatggtgacttcttgcattttctacctcgtgtttttagtgctgttggcaacatttgctacacaccttccaaactcattgagtatagtgattttgctacctctgcttgcgttcttgctgcagagtgtacaatttttaaggatgctatgggcaaacctgtgccatattgttatgacactaatttgctagagggttctatttcttatagtgagcttcgtccagacactcgttatgtgcttatggatggttccatcatacagtttcctaacatttacctggagggttctgttagagtagtaacaacttttgatgctgagtactgtagacatggtacatgcgaaaggtcagaagcaggtatttgcctatctaccagtggtagatgggttcttaataatgagcattacagagctctatcaggagttttctgtggtgttgatgcgatgaatctcatagctaacatctttactcctcttgtgcaacctgtgggtgctttagatgtgtctgcttcagtagtggctggtggtattattgccatattggtgacttgtgctgcctactactttatgaaattcagacgtgcttttggtgagtacaaccatgttgttgctgctaatgcacttttgtttttgatgtctttcactatactctgtctggcaccagcttacagctttctgccgggagtctactcagtcttttacttgtacttgacattctatttcaccaatgatgtttcattcttggctcaccttcaatggtttgccatgttttctcctattgtgcctttttggataacagcaatctatgtattctgtatttctctgaagcactgccattggttctttaacaactatcttaggaaaagagtcatgtttaatggagttacatttagtaccttcgaggaggctgctttgtgtacctttttgctcaacaaggaaatgtacctaaaattgcgtagcgagacactgttgccacttacacagtataacaggtatcttgctctatataacaagtacaagtatttcagtggagccttagatactaccagctatcgtgaagcagcttgctgccacttagcaaaggctctaaatgactttagcaactcaggtgctgatgttctctaccaaccaccacagacatcaatcacttctgctgttctgcagagtggttttaggaaaatggcattcccgtcaggcaaagttgaaggatgcatggtacaagtaacctgtggaactacaactcttaatggattgtggttggatgacacagtatactgtccaagacatgtcatttgcacagcagaagacatgcttaatcctaactatgaagatctgctcattcgcaaatccaaccatagctttcttgttcaggctggcaatgttcaacttcgtgttattggccattctatgcaaaattgtctgcttaggcttaaagttgatacttctaaccctaagacacccaagtataaatttgtccgtatccaacctggtcaaacattttcggttctagcatgctacaatggttcaccatctggtgtttatcagtgtgccatgagacctaatcataccattaaaggttctttccttaatggatcatgtggtagtgttggttttaacattgattatgattgcgtgtctttctgctatatgcatcatatggagcttccaacaggagtacacgctggtactgacttagaaggtaaattctatggtccatttgttgacagacaaactgcacaggctgcaggtacagacacaaccataaccttaaatgttttggcatggctgtatgctgctgttatcaatggtgataggtggtttcttaatagattcaccactactttgaatgactttaaccttgtggcaatgaagtacaactatgaacctttgacacaagatcatgttgacatattgggacctctttctgctcaaacaggaattgccgtcttagatatgtgtgctgctttgaaagagctgctgcagaatggtatgaatggtcgtactatccttggtagcactattttagaagatgagtttacaccatttgatgttgttagacaatgctctggtgttaccttccaaggtaagttcaagaaaattgttaagggcactcatcattggatgcttttaactttcttgacatcactattgattcttgttcaaagtacacagtggtcactgtttttctttgtttacgagaatgctttcttgccatttactcttggtattatggcaattgctgcatgtgctatgctgcttgttaagcataagcacgcattcttgtgcttgtttctgttaccttctcttgcaacagttgcttactttaatatggtctacatgcctgctagctgggtgatgcgtatcatgacatggcttgaattggctgacactagcttgtctggttataggcttaaggattgtgttatgtatgcttcagctttagttttgcttattctcatgacagctcgcactgtttatgatgatgctgctagacgtgtttggacactgatgaatgtcattacacttgtttacaaagtctactatggtaatgctttagatcaagctatttccatgtgggccttagttatttctgtaacctctaactattctggtgtcgttacgactatcatgtttttagctagagctatagtgtttgtgtgtgttgagtattacccattgttatttattactggcaacaccttacagtgtatcatgcttgtttattgtttcttaggctattgttgctgctgctactttggccttttctgtttactcaaccgttacttcaggcttactcttggtgtttatgactacttggtctctacacaagaatttaggtatatgaactcccaggggcttttgcctcctaagagtagtattgatgctttcaagcttaacattaagttgttgggtattggaggtaaaccatgtatcaaggttgctactgtacagtctaaaatgtctgacgtaaagtgcacatctgtggtactgctctcggttcttcaacaacttagagtagagtcatcttctaaattgtgggcacaatgtgtacaactccacaatgatattcttcttgcaaaagacacaactgaagctttcgagaagatggtttctcttttgtctgttttgctatccatgcagggtgctgtagacattaataggttgtgcgaggaaatgctcgataaccgtgctactcttcaggctattgcttcagaatttagttctttaccatcatatgccgcttatgccactgcccaggaggcctatgagcaggctgtagctaatggtgattctgaagtcgttctcaaaaagttaaagaaatctttgaacgtggctaaatctgagtttgaccgtgatgctgccatgcaacgcaagttggaaaagatggcagatcaggctatgacccaaatgtacaaacaggcaagatctgaggacaagagggcaaaagtaactagtgctatgcaaacaatgctcttcactatgcttaggaagcttgataatgatgcacttaacaacattatcaacaatgcgcgtgatggttgtgttccactcaacatcataccattgactacagcagccaaactcatggttgttgtccctgattatggtacctacaagaacacttgtgatggtaacacctttacatatgcatctgcactctgggaaatccagcaagttgttgatgcggatagcaagattgttcaacttagtgaaattaacatggacaattcaccaaatttggcttggcctcttattgttacagctctaagagccaactcagctgttaaactacagaataatgaactgagtccagtagcactacgacagatgtcctgtgcggctggtaccacacaaacagcttgtactgatgacaatgcacttgcctactataacaattcgaagggaggtaggtttgtgctggcattactatcagaccaccaagatctcaaatgggctagattccctaagagtgatggtacaggtacaatttacacagaactggaaccaccttgtaggtttgttacagacacaccaaaagggcctaaagtgaaatacttgtacttcatcaaaggcttaaacaacctaaatagaggtatggtgctgggcagtttagctgctacagtacgtcttcaggctggaaatgctacagaagtacctgccaattcaactgtgctttccttctgtgcttttgcagtagaccctgctaaagcatataaggattacctagcaagtggaggacaaccaatcaccaactgtgtgaagatgttgtgtacacacactggtacaggacaggcaattactgtaacaccagaagctaacatggaccaagagtcctttggtggtgcttcatgttgtctgtattgtagatgccacattgaccatccaaatcctaaaggattctgtgacttgaaaggtaagtacgtccaaatacctaccacttgtgctaatgacccagtgggttttacacttagaaacacagtctgtaccgtctgcggaatgtggaaaggttatggctgtagttgtgaccaactccgcgaacccttgatgcagtctgcggatgcatcaacgtttttaaacgggtttgcggtgtaagtgcagcccgtcttacaccgtgcggcacaggcactagtactgatgtcgtctacagggcttttgatatttacaacgaaaaagttgctggttttgcaaagttcctaaaaactaattgctgtcgcttccaggagaaggatgaggaaggcaatttattagactcttactttgtagttaagaggcatactatgtctaactaccaacatgaagagactatttataacttggttaaagattgtccagcggttgctgtccatgactttttcaagtttagagtagatggtgacatggtaccacatatatcacgtcagcgtctaactaaatacacaatggctgatttagtctatgctctacgtcattttgatgagggtaattgtgatacattaaaagaaatactcgtcacatacaattgctgtgatgatgattatttcaataagaaggattggtatgacttcgtagagaatcctgacatcttacgcgtatatgctaacttaggtgagcgtgtacgccaatcattattaaagactgtacaattctgcgatgctatgcgtgatgcaggcattgtaggcgtactgacattagataatcaggatcttaatgggaactggtacgatttcggtgatttcgtacaagtagcaccaggctgcggagttcctattgtggattcatattactcattgctgatgcccatcctcactttgactagggcattggctgctgagtcccatatggatgctgatctcgcaaaaccacttattaagtgggatttgctgaaatatgattttacggaagagagactttgtctcttcgaccgttattttaaatattgggaccagacataccatcccaattgtattaactgtttggatgataggtgtatccttcattgtgcaaactttaatgtgttattttctactgtgtttccacctacaagttttggaccactagtaagaaaaatatttgtagatggtgttccttttgttgtttcaactggataccattttcgtgagttaggagtcgtacataatcaggatgtaaacttacatagctcgcgtctcagtttcaaggaacttttagtgtatgctgctgatccagctatgcatgcagcttctggcaatttattgctagataaacgcactacatgcttttcagtagctgcactaacaaacaatgttgcttttcaaactgtcaaacccggtaattttaataaagacttttatgactttgctgtgtctaaaggtttctttaaggaaggaagttctgttgaactaaaacacttcttctttgctcaggatggcaacgctgctatcagtgattatgactattatcgttataatctgccaacaatgtgtgatatcagacaactcctattcgtagttgaagttgttgataaatactttgattgttacgatggtggctgtattaatgccaaccaagtaatcgttaacaatctggataaatcagctggtttcccatttaataaatggggtaaggctagactttattatgactcaatgagttatgaggatcaagatgcacttttcgcgtatactaagcgtaatgtcatccctactataactcaaatgaatcttaagtatgccattagtgcaaagaatagagctcgcaccgtagctggtgtctctatctgtagtactatgacaaatagacagtttcatcagaaattattgaagtcaatagccgccactagaggagctactgtggtaattggaacaagcaagttttacggtggctggcataatatgttaaaaactgtttacagtgatgtagaaactccacaccttatgggttgggattatccaaaatgtgacagagccatgcctaacatgcttaggataatggcctctcttgttcttgctcgcaaacataacacttgctgtaacttatcacaccgtttctacaggttagctaacgagtgtgcgcaagtattaagtgagatggtcatgtgtggcggctcactatatgttaaaccaggtggaacatcatccggtgatgctacaactgcttatgctaatagtgtctttaacatttgtcaagctgttacagccaatgtaaatgcacttctttcaactgatggtaataagatagctgacaagtatgtccgcaatctacaacacaggctctatgagtgtctctatagaaatagggatgttgatcatgaattcgtggatgagttttacgcttacctgcgtaaacatttctccatgatgattctttctgatgatgccgttgtgtgctataacagtaactatgcggctcaaggtttagtagctagcattaagaactttaaggcagttctttattatcaaaataatgtgttcatgtctgaggcaaaatgttggactgagactgaccttactaaaggacctcacgaattttgctcacagcatacaatgctagttaaacaaggagatgattacgtgtacctgccttacccagatccatcaagaatattaggcgcaggctgttttgtcgatgatattgtcaaaacagatggtacacttatgattgaaaggttcgtgtcactggctattgatgcttacccacttacaaaacatcctaatcaggagtatgctgatgtctttcacttgtatttacaatacattagaaagttacatgatgagcttactggccacatgttggacatgtattccgtaatgctaactaatgataacacctcacggtactgggaacctgagttttatgaggctatgtacacaccacatacagtcttgcaggctgtaggtgcttgtgtattgtgcaattcacagacttcacttcgttgcggtgcctgtattaggagaccattcctatgttgcaagtgctgctatgaccatgtcatttcaacatcacacaaattagtgttgtctgttaatccctatgtttgcaatgccccaggttgtgatgtcactgatgtgacacaactgtatctaggaggtatgagctattattgcaagtcacataagcctcccattagttttccattatgtgctaatggtcaggtttttggtttatacaaaaacacatgtgtaggcagtgacaatgtcactgacttcaatgcgatagcaacatgtgattggactaatgctggcgattacatacttgccaacacttgtactgagagactcaagcttttcgcagcagaaacgctcaaagccactgaggaaacatttaagctgtcatatggtattgccactgtacgcgaagtactctctgacagagaattgcatctttcatgggaggttggaaaacctagaccaccattgaacagaaactatgtctttactggttaccgtgtaactaaaaatagtaaagtacagattggagagtacacctttgaaaaaggtgactatggtgatgctgttgtgtacagaggtactacgacatacaagttgaatgttggtgattactttgtgttgacatctcacactgtaatgccacttagtgcacctactctagtgccacaagagcactatgtgagaattactggcttgtacccaacactcaacatctcagatgagttttctagcaatgttgcaaattatcaaaaggtcggcatgcaaaagtactctacactccaaggaccacctggtactggtaagagtcattttgccatcggacttgctctctattacccatctgctcgcatagtgtatacggcatgctctcatgcagctgttgatgccctatgtgaaaaggcatcaaaatatttgcccatagataaatgtagtagaatcatacctgcgcgtgcgcgcgtagagtgttttgataaattcaaagtgaattcaacactagaacagtatgttttctgcactgtaaatgcattgccagaaacaactgctgacattgtagtctttgatgaaatctctatggctactaattatgacttgagtgttgtcaatgctagacttcgtgcaaaacactacgtctatattggcgatcctgctcaattaccagccccccgcacattgctgactaaaggcacactagaaccagaatattttaattcagtgtgcagacttatgaaaacaataggtccagacatgttccttggaacttgtcgccgttgtcctgctgaaattgttgacactgtgagtgctttagtttatgacaataagctaaaagcacacaaggagaagtcagctcaatgcttcaaaatgttctacaaaggtgttattacacatgatgtttcatctgcaatcaacagacctcaaataggcgttgtaagagaatttcttacacgcaatcctgcttggagaaaagctgtttttatctcaccttataattcacagaacgctgtagcttcaaaaatcttaggattgcctacgcagactgttgattcatcacagggttctgaatatgactatgtcatattcacacaaactactgaaacagcacactcttgtaatgtcaaccgcttcaatgtggctatcacaagggcaaaaattggcattttgtgcataatgtctgatagagatctttatgacaaactgcaatttacaagtctagaaataccacgtcgcaatgtggctacattacaagcagaaaatgtaactggactttttaaggactgtagtaagatcattactggtcttcatcctacacaggcacctacacacctcagcgttgatataaagttcaagactgaaggattatgtgttgacataccaggcataccaaaggacatgacctaccgtagactcatctctatgatgggtttcaaaatgaattaccaagtcaatggttatcctaatatgtttatcacccgcgaagaagctattcgtcacgttcgtgcgtggattggctttgatgtagagggctgtcatgcaactagagatgctgtgggtactaacctacctctccagctaggattttctacaggtgttaacttagtagctgtaccgactggttatgttgacactgaaaataacacagaattcaccagagttaatgcaaaacctccaccaggtgaccagtttaaacatcttataccactcatgtataaaggcttgccctggaatgtagtgcgtattaagatagtacaaatgctcagtgatacactgaaaggattgtcagacagagtcgtgttcgtcctttgggcgcatggctttgagcttacatcaatgaagtactttgtcaagattggacctgaaagaacgtgttgtctgtgtgacaaacgtgcaacttgcttttctacttcatcagatacttatgcctgctggaatcattctgtgggttttgactatgtctataacccatttatgattgatgttcagcagtggggctttacgggtaaccttcagagtaaccatgaccaacattgccaggtacatggaaatgcacatgtggctagttgtgatgctatcatgactagatgtttagcagtccatgagtgctttgttaagcgcgttgattggtctgttgaataccctattataggagatgaactgagggttaattctgcttgcagaaaagtacaacacatggttgtgaagtctgcattgcttgctgataagtttccagttcttcatgacattggaaatccaaaggctatcaagtgtgtgcctcaggctgaagtagaatggaagttctacgatgctcagccatgtagtgacaaagcttacaaaatagaggaactcttctattcttatgctacacatcacgataaattcactgatggtgtttgtttgttttggaattgtaacgttgatcgttacccagccaatgcaattgtgtgtaggtttgacacaagagtcttgtcaaacttgaacttaccaggctgtgatggtggtagtttgtatgtgaataagcatgcattccacactccagctttcgataaaagtgcatttactaatttaaagcaattgcctttcttttactattctgatagtccttgtgagtctcatggcaaacaagtagtgtcggatattgattatgttccactcaaatctgctacgtgtattacacgatgcaatttaggtggtgctgtttgcagacaccatgcaaatgagtaccgacagtacttggatgcatataatatgatgatttctgctggatttagcctatggatttacaaacaatttgatacttataacctgtggaatacatttaccaggttacagagtttagaaaatgtggcttataatgttgttaataaaggacactttgatggacacgccggcgaagcacctgtttccatcattaataatgctgtttacacaaaggtagatggtattgatgtggagatctttgaaaataagacaacacttcctgttaatgttgcatttgagctttgggctaagcgtaacattaaaccagtgccagagattaagatactcaataatttgggtgttgatatcgctgctaatactgtaatctgggactacaaaagagaagccccagcacatgtgtctacaataggtgtctgcacaatgactgacattgccaagaaacctactgagagtgcttgttcttcacttactgtcttgtttgatggtagagtggaaggacaggtagacctttttagaaacgcccgtaatggtgttttaataacagaaggttcagtcaaaggtctaacaccttcaaagggaccagcacaagctagcgtcaatggagtcacattaattggagaatcagtaaaaacacagtttaactactttaagaaagtagacggcattattcaacagttgcctgaaacctactttactcagagcagagacttagaggattttaagcccagatcacaaatggaaactgactttctcgagctcgctatggatgaattcatacagcgatataagctcgagggctatgccttcgaacacatcgtttatggagatttcagtcatggacaacttggcggtcttcatttaatgataggcttagccaagcgctcacaagattcaccacttaaattagaggattttatccctatggacagcacagtgaaaaattacttcataacagatgcgcaaacaggttcatcaaaatgtgtgtgttctgtgattgatcttttacttaatgacttcgtcgagataataaagtcacaagatttgtcagtgatttcaaaagtggtcaaggttacaattgactatgctgaaatttcattcatgctttggtgtaaggatggacatgttgaaaccttctacccaaaactacaagcaagtcaagcgtggcaaccaggtgttgcgatgcctaacttgtacaagatgcaaagaatgcttcttgaaaagtgtgaccttcagaattatggtgaaaatgctgttataccaaaaggaataatgatgaatgtcgcaaagtatactcaactgtgtcaatacttaaatacacttactttagctgtaccctacaacatgagagttattcactttggtgctggctctgataaaggagttgcaccaggtacagctgtgctcagacaatggttgccaactggcacactacttgtcgattcagatcttaatgaattcgtctccgacgcagattctactttaattggagactgtgcaacagtacatacggctaataaatgggaccttatcattagcgatatgtatgaccctaggaccaaacatgtgacaaaagagaatgactctaaagaagggtttttcacttatctgtgtggatttataaagcaaaaactagccctgggtggttctatagctgtaaagataacagagcattcttggaatgctgacctttacaagcttatgggccatttctcatggtggacagcttttgttacaaatgtaaatgcatcatcatcggaagcatttttaattggggctaactatcttggcaagccgaaggaacaaattgatggctataccatgcatgctaactacattttctggaggaagacaaatcctatccagttgtcttcctattcactctttgacatgagcaaatttcctcttaaattaagaggaactgctgtaatgtctcttaaggagaatcaaatcaatgatatgatttattctcttctggaaaaaggtaggcttatcattagagaaaacaacagagttgtggtttcaagtgatattcttgttaataactaaacgaacatgtttattttcttattatttcttactctcactagtggtagtgaccttgaccggtgcaccacttttgatgatgttcaagctcctaattacactcaacatacttcatctatgaggggggtttactatcctgatgaaatttttagatcagacactctttatttaactcaggatttatttcttccattttattctaatgttacagggtttcatactattaatcatacgtttgacaaccctgtcataccttttaaggatggtatttattttgctgccacagagaaatcaaatgttgtccgtggttgggtttttggttctaccatgaacaacaagtcacagtcggtgattattattaacaattctactaatgttgttatacgagcatgtaactttgaattgtgtgacaaccctttctttgctgtttctaaacccatgggtacacagacacatactatgatattcgataatgcatttaattgcactttcgagtacatatctgatgccttttcgcttgatgtttcagaaaagtcaggtaattttaaacacttacgagagtttgtgtttaaaaataaagatgggtttctctatgtttataagggctatcaacctatagatgtagttcgtgatctaccttctggttttaacactttgaaacccatttttaagttgcctcttggtattaacattacaaattttagagccattcttacagcctttttacctgctcaagacacttggggcacgtcagctgcagcctattttgttggctatttaaagccaactacatttatgctcaagtatgatgaaaatggtacaatcacagatgctgttgattgttctcaaaatccacttgctgaactcaaatgctctgttaagagctttgagattgacaaaggaatttaccagacctctaatttcagggttgttccctcaagagatgttgtgagattccctaatattacaaacttgtgtccttttggagaggtttttaatgctactaaattcccttctgtctatgcatgggagaggaaaagaatttctaattgtgttgctgattactctgtgctctacaactcaacatttttttcaacctttaagtgctatggcgtttctgccactaagttgaatgatctttgcttctccaatgtctatgcagattcttttgtagtcaagggagatgatgtaagacaaatagcgccaggacaaactggtgttattgctgattataattataaattgccagatgatttcatgggttgtgtccttgcttggaatactaggaacattgatgctacttcaactggtaattataattataaatataggtatcttagacatggcaagcttaggccctttgagagagacatatctaatgtgcctttctcccctgatggcaaaccttgcaccccacctgctcttaattgttattggccattaaatgattatggtttttacaccactactggcattggctaccaaccttacagagttgtagtactttcttatgaacttttaaatgcaccggccacggtttgtggaccaaaattatccactgaccttattaagaaccagtgtgtcaattttaattttaatggactcactggtactggtgtgttaactccttcttcaaagagatttcaaccatttcaacaatttggccgtgatgtttctgatttcactgattccgttcgagatcctaaaacatctgaaatattagacatttcaccttgctcttttgggggtgtaagtgtaattacacctggaacaaatgcttcatctgaagttgctgttctatatcaagatgttaactgcactgatgtttctacagcaattcatgcagatcaactcacaccagcttggcgcatatattctactggaaacaatgtattccagactcaagcaggctgtcttataggagctgagcatgtcgacacttcttatgagtgcgacattcctattggagctggcatttgtgctagttaccatacagtttctttattacgtagtactagccaaaaatctattgtggcttatactatgtctttaggtgctgatagttcaattgcttactctaataacaccattgctatacctactaacttttcaattagcattactacagaagtaatgcctgtttctatggctaaaacctccgtagattgtaatatgtacatctgcggagattctactgaatgtgctaatttgcttctccaatatggtagcttttgcacacaactaaatcgtgcactctcaggtattgctgctgaacaggatcgcaacacacgtgaagtgttcgctcaagtcaaacaaatgtacaaaaccccaactttgaaagattttggtggttttaatttttcacaaatattacctgaccctctaaagtcaactaagaggtcttttattgaggacttgctctttaataaggtgacactcgctgatgctggcttcatgaagcaatatggcgaatgcctaggtgatattaatgctagagatctcatttgtgcgcagaagttcaatggacttacagtgttgccacctctgctcactgatgatatgattgctgcctacactgctgctctagttagtggtactgccactgctggatggacatttggtgctggcgctgctcttcaaataccttttgctatgcaaatggcatataggttcaatggcattggagttacccaaaatgttctctatgagaaccaaaaacaaatcgccaaccaatttaacaaggcgattagtcaaattcaagaatcacttacaacaacatcaactgcattgggcaagctgcaagacgttgttaaccagaatgctcaagcattaaacacacttgttaaacaacttagctctaattttggtgcaatttcaagtgtgctaaatgatatcctttcgcgacttgataaagtcgaggcggaggtacaaattgacaggttaattacaggcagacttcaaagccttcaaacctatgtaacacaacaactaatcagggctgctgaaatcagggcttctgctaatcttgctgctactaaaatgtctgagtgtgttcttggacaatcaaaaagagttgacttttgcggaaagggctaccaccttatgtccttcccacaagcagccccgcatggtgttgtcttcctacatgtcacgtatgtgccatcccaggagaggaacttcaccacagcgccagcaatttgtcatgaaggcaaagcatacttccctcgtgaaggtgtttttgtgtttaatggcacttcttggtttattacacagaggaacttcttttctccacaaataattactacagacaatacatttgtctcaggaaattgtgatgtcgttattggcatcattaacaacacagtttatgatcctctgcaacctgagcttgactcattcaaagaagagctggacaagtacttcaaaaatcatacatcaccagatgttgatcttggcgacatttcaggcattaacgcttctgtcgtcaacattcaaaaagaaattgaccgcctcaatgaggtcgctaaaaatttaaatgaatcactcattgaccttcaagaattgggaaaatatgagcaatatattaaatggccttggtatgtttggctcggcttcattgctggactaattgccatcgtcatggttacaatcttgctttgttgcatgactagttgttgcagttgcctcaagggtgcatgctcttgtggttcttgctgcaagtttgatgaggatgactctgagccagttctcaagggtgtcaaattacattacacataaacgaacttatggatttgtttatgagattttttactcttggatcaattactgcacagccagtaaaaattgacaatgcttctcctgcaagtactgttcatgctacagcaacgataccgctacaagcctcactccctttcggatggcttgttattggcgttgcatttcttgctgtttttcagagcgctaccaaaataattgcgctcaataaaagatggcagctagccctttataagggcttccagttcatttgcaatttactgctgctatttgttaccatctattcacatcttttgcttgtcgctgcaggtatggaggcgcaatttttgtacctctatgccttgatatattttctacaatgcatcaacgcatgtagaattattatgagatgttggctttgttggaagtgcaaatccaagaacccattactttatgatgccaactactttgtttgctggcacacacataactatgactactgtataccatataacagtgtcacagatacaattgtcgttactgcaggtgacggcatttcaacaccaaaactcaaagaagactaccaaattggtggttattctgaggattggcactcaggtgttaaagactatgtcgttgtacatggctatttcaccgaagtttactaccagcttgagtctacacaaattactacagacactggtattgaaaatgctacattcttcatctttaacaagcttgttaaagacccaccgaatgtgcaaatacacacaatcgacggctcttcaggagttgcaaatccagcaatggatccaatttatgatgagccgacgacgactactagcgtgcctttgtaagcacaagaaagtgagtacgaacttatgtactcattcgtttcggaagaaacaggtacgttaatagttaatagcgtacttctttttcttgctttcatggtattcttgctagtcacactagccatccttactgcgcttcgattgtgtgcgtactgctgcaatattgttaacgtgagtttagtaaaaccaacggtttacgtctactcgcgtgttaaaaatctgaactcttctgaaggagttcctgatcttctggtctaaacgaactaactattattattattctgtttggaactttaacattgcttatcatggcagacaacggtactattaccgttgaggagcttaaacaactcctggaacaatggaacctagtaataggtttcctattcctagcctggattatgttactacaatttgcctattctaatcggaacaggtttttgtacataataaagcttgttttcctctggctcttgtggccagtaacacttgcttgttttgtgcttgctgctgtctacagaattaattgggtgactggcgggattgcgattgcaatggcttgtattgtaggcttgatgtggcttagctacttcgttgcttccttcaggctgtttgctcgtacccgctcaatgtggtcattcaacccagaaacaaacattcttctcaatgtgcctctccgggggacaattgtgaccagaccgctcatggaaagtgaacttgtcattggtgctgtgatcattcgtggtcacttgcgaatggccggacactccctagggcgctgtgacattaaggacctgccaaaagagatcactgtggctacatcacgaacgctttcttattacaaattaggagcgtcgcagcgtgtaggcactgattcaggttttgctgcatacaaccgctaccgtattggaaactataaattaaatacagaccacgccggtagcaacgacaatattgctttgctagtacagtaagtgacaacagatgtttcatcttgttgacttccaggttacaatagcagagatattgattatcattatgaggactttcaggattgctatttggaatcttgacgttataataagttcaatagtgagacaattatttaagcctctaactaagaagaattattcggagttagatgatgaagaacttatggagttagattatccataaaacgaacatgaaaattattctcttcctgacattgattgtatttacatcttgcgagctatatcactatcaggagtgtgttagaggtacgactgtactactaaaagaaccttgcccatcaggaacatacgagggcaattcaccatttcaccctcttgctgacaataaatttgcactaacttgcactagcacacactttgcttttgcttgtgctgacggtactcgacatacctatcagctgcgtgcaagatcagtttcaccaaaacttttcatcagacaagaggaggttcaacaagagctctactcgccactttttctcattgttgctgctctagtatttttaatactttgcttcaccattaagagaaagacagaatgaatgagctcactttaattgacttctatttgtgctttttagcctttctgctattccttgttttaataatgcttattatattttggttttcactcgaaatccaggatctagaagaaccttgtaccaaagtctaaacgaacatgaaacttctcattgttttgacttgtatttctctatgcagttgcatacgcactgtagtacagcgctgtgcatctaataaacctcatgtgcttgaagatccttgtcctactggttaccaacctgaatggaatataaggtacaacactaggggtaatacttatagcactgcttggctttgtgctctaggaaaggttttaccttttcatagatggcacactatggttcaaacatgcacacctaatgttactatcaactgtcaagatccagctggtggtgcgcttatagctaggtgttggtaccttcatgaaggtcaccaaactgctgcatttagagacgtatttgttgttttaaataaacgaacaaattaaaatgtctgataatggaccccaatcaaaccaacgtagtgccccccgcattacatttggtggacccacagattcaactgacaataaccagaatggaggacgcaatggggcaaggccaaaacagcgccgaccccaaggtttacccaataatactgcgtcttggttcacagctctcactcagcatggcaaggaggaacttagattccctcgaggccagggcgttccaatcaacaccaatagtggtccagatgaccaaattggctactaccgaagagctacccgacgagttcgtggtggtgacggcaaaatgaaagagctcagccccagatggtacttctattacctaggaactggcccagaagcttcacttccctacggcgctaacaaagaaggcatcgtatgggttgcaactgagggagccttgaatacacccaaagaccacattggcacccgcaatcctaataacaatgctgccaccgtgctacaacttcctcaaggaacaacattgccaaaaggcttctacgcagagggaagcagaggcggcagtcaagcctcttctcgctcctcatcacgtagtcgcggtaattcaagaaattcaactcctggcagcagtaggggaaattctcctgctcgaatggctagcggaggtggtgaaactgccctcgcgctattgctgctagacagattgaaccagcttgagagcaaagtttctggtaaaggccaacaacaacaaggccaaactgtcactaagaaatctgctgctgaggcatctaaaaagcctcgccaaaaacgtactgccacaaaacagtacaacgtcactcaagcatttgggagacgtggtccagaacaaacccaaggaaatttcggggaccaagacctaatcagacaaggaactgattacaaacattggccgcaaattgcacaatttgctccaagtgcctctgcattctttggaatgtcacgcattggcatggaagtcacaccttcgggaacatggctgacttatcatggagccattaaattggatgacaaagatccacaattcaaagacaacgtcatactgctgaacaagcacattgacgcatacaaaacattcccaccaacagagcctaaaaaggacaaaaagaaaaagactgatgaagctcagcctttgccgcagagacaaaagaagcagcccactgtgactcttcttcctgcggctgacatggatgatttctccagacaacttcaaaattccatgagtggagcttctgctgattcaactcaggcataaacactcatgatgaccacacaaggcagatgggctatgtaaacgttttcgcaattccgtttacgatacatagtctactcttgtgcagaatgaattctcgtaactaaacagcacaagtaggtttagttaactttaatctcacatagcaatctttaatcaatgtgtaacattagggaggacttgaaagagccaccacattttcatcgaggccacgcggagtacgatcgagggtacagtgaataatgctagggagagctgcctatatggaagagccctaatgtgtaaaattaattttagtagtgctatccccatgtgattttaatagcttcttaggagaatgacaaaaaaaaaaaaaaaaa

SEQ ID NO: 60 - DNA, 29429 bp, Coronavirus
  misc_feature 860-959, 2509-2608, 3338-3437, 5551, 5767-5866, 7296-7395, 8908,10914-11014, 11744-11843, 14993-15092, 20606, 20953, 21432-21531,25728, 25746, 26631-26730, 28364,: n = A,T,C or G
cccctttattttcgcaaccagctcaacatcatctacccaggaaaagccaaccaacctcgatctcttgtagatctgttctctaaacgaactttaaaatctgtgtagctgtcgctcggctgcatgcctagtgcacctacgcagtataaacaataataaattttactgtcgttgacaagaaacgagtaactcgttcctcttctgcagactgcttacggtttcgtccgtgttgcagtcgatcatcagcatacctaggtttcgtccgggtgtgaccgaaaggtaagatggagagccttgttcttggtgtcaacgagaaaacacacgtccaactcagtttgcctgtccttcaggttagagacgtgctagtgcgtggcttcggggactctgtggaagaggccctatcggaggcacgtgaacacctcaaaaatggcacttgtggtctagtagagctggaaaaaggcgtactgccccagcttgaacagccctatgtgttcattaaacgttctgatgccttaagcaccaatcactgccacaaggtcgttgagctggttgcagaaatggacggcattcagtacggtcgtagcggtataacactgggagtactcgtgccacatgtgggcgaaaccccaattgcataccgcaatgttcttcttcgtaagaacggtaataagggagccggtggtcatagctatggcatcgatctaaagtcttatgacttaggtgacgagcttggcactgatcccattgaagattatgaacaaaactggaacactaagcatggcagtggtgcactccgtgaactcactcgtgagctcaatggaggtgcagtcactcgctatgtcgacaacaatttctgtggcccnnnnnnnnnnnnnnnnnnnnnnnnnnnnnnnnnnnnnnnnnnnnnnnnnnnnnnnnnnnnnnnnnnnnnnnnnnnnnnnnnnnnnnnnnnnnnnnnnnnntcgaagagaggtgtctactgctgccgtgaccatgagcatgaaattgcctggttcactgagcgctctgataagagctacgagcaccagacacccttcgaaattaagagtgccaagaaatttgacactttcaaaggggaatgcccaaagtttgtgtttcctcttaactcaaaagtcaaagtcattcaaccacgtgttgaaaagaaaaagactgagggtttcatggggcgtatacgctctgtgtaccctgttgcatctccacaggagtgtaacaacatgcacttgtctaccttgatgaaatgtaatcattgcgatgaagtttcatggcagacgtgcgactttctgaaagccacttgtgaacattgtggcactgaaaatttagttattgaaggacctactacatgtgggtacctacctactaatgctgtagtgaaaatgccatgtcctgcctgtcaagacccagagattggacctgagcatagtgttgcagattatcacaaccactcaaacattgaaactcgactccgcaagggaggtaggactagatgttttggaggctgtgtgtttgcctatgttggctgctataataagcgtgcctactgggttcctcgtgctagtgctgatattggctcaggccatactggcattactggtgacaatgtggagaccttgaatgaggatctccttgagatactgagtcgtgaacgtgttaacattaacattgttggcgattttcatttgaatgaagaggttgccatcattttggcatctttctctgcttctacaagtgcctttattgacactataaagagtcttgattacaagtctttcaaaaccattgttgagtcctgcggtaactataaagttaccaagggaaagcccgtaaaaggtgcttggaacattggacaacagagatcagttttaacaccactgtgtggttttccctcacaggctgctggtgttatcagatcaatttttgcgcgcacacttgatgcagcaaaccactcaattcctgatttgcaaagagcagctgtcaccatacttgatggtatttctgaacagtcattacgtcttgtcgacgccatggtttatacttcagacctgctcaccaacagtgtcattattatggcatatgtaactggtggtcttgtacaacagacttctcagtggttgtctaatcttttgggcactactgttgaaaaactcaggcctatctttgaatggattgaggcgaaacttagtgcaggagttgaatttctcaaggatgcttgggagattctcaaatttctcattacaggtgtttttgacatcgtcaagggtcaaatacaggttgcttcagataacatcaaggattgtgtaaaatgcttcattgatgttgttaacaaggcactcgaaatgtgcattgatcaagtcactatcgctggcgcaaagttgcgatcactcaacttaggtgaagtcttcatcgctcaaagcaagggactttaccgtcagtgtatacgtggcaaggagcagctgcaactactcatgcctcttaaggcaccaaaagaagtaannnnnnnnnnnnnnnnnnnnnnnnnnnnnnnnnnnnnnnnnnnnnnnnnnnnnnnnnnnnnnnnnnnnnnnnnnnnnnnnnnnnnnnnnnnnnnnnnnnngaggaggttgttctcaagaacggtgaactcgaagcactcgagacgcccgttgatagcttcacaaatggagctatcgttggcacaccagtctgtgtaaatggcctcatgctcttagagattaaggacaaagaacaatactgcgcattgtctcctggtttactggctacaaacaatgtctttcgcttaaaagggggtgcaccaattaaaggtgtaacctttggagaagatactgtttgggaagttcaaggttacaagaatgtgagaatcacatttgagcttgatgaacgtgttgacaaagtgcttaatgaaaagtgctctgtctacactgttgaatccggtaccgaagttactgagtttgcatgtgttgtagcagaggctgttgtgaagactttacaaccagtttctgatctccttaccaacatgggtattgatcttgatgagtggagtgtagctacattctacttatttgatgatgctggtgaagaaaacttttcatcacgtatgtattgttccttttaccctccagatgaggaagaagaggacgatgcagagtgtgaggaagaagaaattgatgaaacctgtgaacatgagtacggtacagaggatgattatcaaggtctccctctggaatttggtgcctcagctgaaacagttcgagttgaggaagaagaagaggaagactggctggatgatactactgagcaatcagagattgagccagaaccagaannnnnnnnnnnnnnnnnnnnnnnnnnnnnnnnnnnnnnnnnnnnnnnnnnnnnnnnnnnnnnnnnnnnnnnnnnnnnnnnnnnnnnnnnnnnnnnnnnnnccattaaatgtgctgacatcgttaaggaggcacaaagtgctaatcctatggtgattgtaaatgctgctaacatacacctgaaacatggtggtggtgtagcaggtgcactcaacaaggcaaccaatggtgccatgcaaaaggagagtgatgattacattaagctaaatggccctcttacagtaggagggtcttgtttgctttctggacataatcttgctaagaagtgtctgcatgttgttggacctaacctaaatgcaggtgaggacatccagcttcttaaggcagcatatgaaaatttcaattcacaggacaccttacttgcaccattgttgtcagcaggcatatttggtgctaaaccacttcagtctttacaagtgtgcgtgcagacggttcgtacacaggtttatattgcagtcaatgacaaagctctttatgagcaggttgtcatggattatcttgataacctgaagcctagagtggaagcacctaaacaagaggagccaccaaacacagaagattccaaaactgaggagaaatctgtcgtacagaagcctgtcgatgtgaagccaaaaattaaggcctgcattgatgaggttaccacaacactggaagaaactaagtttcttaccaataagttactcttgtttgctgatatcaatggtaagctttaccatgattctcagaacatgcttagaggtgaagatatgtctttccttgagaaggatgcaccttacatggtaggtgatgttatcactagtggtgatatcacttgtgttgtaataccctccaaaaaggctggtggcactactgagatgctctcaagagctttgaagaaagtgccagttgatgagtatataaccacgtaccctggacaaggatgtgctggttatacacttgaggaagctaggactgctcttaagaaatgcaaatctgcattttatgtactaccttcagaagcacctaatgctaaggaagagattctaggaactgtatcctggaatttgagagaaatgcttgctcatgctgaagagacaagaaaattaatgcctatatgcatggatgttagagccataatggcaaccatccaacgtaagtataaaggaattaaaattcaagagggcatcgttgactatggtgtccgattcttcttttatactagtaaagagcctgtagcttctattattacgaagctgaactctctaaatgagccgcttgtcacaatgccaattggttatgtgacacatggttttaatcttgaagaggctgcgcgctgtatgcgttctcttaaagctcctgccgtagtgtcagtatcatcaccagatgctgttactacatataatggatacctcacttcgtcatcaaagacatctgaggagcactttgtagaaacagtttctttggctggctcttacagagattggtcctattcaggacagcgtacagagttaggtgttgaatttcttaagcgtggtgacaaaattgtgtaccacactctggagagccccgtcgagtttcatcttgacggtgaggttctttcacttgacaaactaaagagtctcttatccctgcgggaggttaagactataaaagtgttcacaactgtggacaacactaatctccacacacagcttgtggatatgtctatgacatatggacagcagtttggtccaacatacttggatggtgctgatgttacaaaaattaaacctcatgtaaatcatgagggtaagactttctttgtactacctagtgatgacacactacgtagtgaagctttcgagtactaccatactcttgatgagagttttcttggtaggtacatgtctgctttaaaccacacaaagaaatggaaatttcctcaagttggtggtttaacttcaattaaatgggctgataacaattgttatttgtctagtgttttattagcacttcaacagattgaagtcaaattcaatgcaccagcacttcaagaggcttattatagagcccgtgctggtgatgctgctaacttttgtgcactcatactcgcttacagtaataaaactgttggcgagcttggtgatgtcagagaaactatgacccatcttctacagcatgctaatttggaatctgcnaagcgagttcttaatgtggtgtgtaaacattgtggtcagaaaactactaccttaacgggtgtagaagctgtgatgtatatgggtactctatcttatgataatcttaagacaggtgtttccattccatgtgtgtgtggtcgtgatgctacacaatatctagtacaacaagagtcttcttttgttatgatgtctgcaccacctgctgagtataaattnnnnnnnnnnnnnnnnnnnnnnnnnnnnnnnnnnnnnnnnnnnnnnnnnnnnnnnnnnnnnnnnnnnnnnnnnnnnnnnnnnnnnnnnnnnnnnnnnnnncactacaaccatcaagcctgtgtcgtataaactcgatggagttacttacacagagattgaaccaaaattggatgggtattataaaaaggataatgcttactatacagagcagcctatagaccttgtaccaactcaaccattaccaaatgcgagttttgataatttcaaactcacatgttctaacacaaaatttgctgatgatttaaatcaaatgacaggcttcacaaagccagcttcacgagagctatctgtcacattcttcccagacttgaatggcgatgtagtggctattgactatagacactattcagcgagtttcaagaaaggtgctaaattactgcataagccaattgtttggcacattaaccaggctacaaccaagacaacgttcaaaccaaacacttggtgtttacgttgtctttggagtacaaagccagtagatacttcaaattcatttgaagttctggcagtagaagacacacaaggaatggacaatcttgcttgtgaaagtcaacaacccacctctgaagaagtagtggaaaatcctaccatacagaaggaagtcatagagtgtgacgtgaaaactaccgaagttgtaggcaatgtcatacttaaaccatcagatgaaggtgttaaagtaacacaagagttaggtcatgaggatcttatggctgcttatgtggaaaacacaagcattaccattaagaaacctaatgagctttcactagccttaggtttaaaaacaattgccactcatggtattgctgcaattaatagtgttccttggagtaaaatttttgcttatgtcaaaccattcttaggacaagcagcaattacaacatcaaattgcgctaagagattagcacaacgtgtgtttaacaattatatgccttatgtgtttacattattgttccaattgtgtacttttactaaaagtaccaattctagaattagagcttcactacctacaactattgctaaaaatagtgttaagagtgttgctaaattatgtttggatgccggcattaattatgtgaagtcacccaaattttctaaattgttcacaatcgctatgtggctattgttgttaagtatttgcttaggttctctaatctatgtaactgctgcttttggtgtactcttatctaattttggtgctccttcttattgtaatggcgttagagaattgtatcttaattcgtctaacgttactactatggatttctgtgaaggttcttttccttgcagcatttgtttaagtggattagactcccttgattcttatccagctcttgaaaccattcaggtgacgatttcatcgtacaagctagacttgacaattttaggtctggccgctgagtgggttttggcatatatgttgttcacaaaattcttttatttattaggtctttcagctataatgcaggtgnnnnnnnnnnnnnnnnnnnnnnnnnnnnnnnnnnnnnnnnnnnnnnnnnnnnnnnnnnnnnnnnnnnnnnnnnnnnnnnnnnnnnnnnnnnnnnnnnnnngtattgtacaaatggcacccgtttctgcaatggttaggatgtacatcttctttgcttctttctactacatatggaagagctatgttcatatcatggatggttgcacctcttcgacttgcatgatgtgctataagcgcaatcgtgccacacgcgttgagtgtacaactattgttaatggcatgaagagatctttctatgtctatgcaaatggaggccgtggcttctgcaagactcacaattggaattgtctcaattgtgacacattttgcactggtagtacattcattagtgatgaagttgctcgtgatttgtcactccagtttaaaagaccaatcaaccctactgaccagtcatcgtatattgttgatagtgttgctgtgaaaaatggcgcgcttcacctctactttgacaaggctggtcaaaagacctatgagagacatccgctctcccattttgtcaatttagacaatttgagagctaacaacactaaaggttcactgcctattaatgtcatagtttttgatggcaagtccaaatgcgacgagtctgcttctaagtctgcttctgtgtactacagtcagctgatgtgccaacctattctgttgcttgaccaagctcttgtatcagacgttggagatagtactgaagtttccgttaagatgtttgatgcttatgtcgacaccttttcagcaacttttagtgttcctatggaaaaacttaaggcacttgttgctacagctcacagcgagttagcaaagggtgtagctttagatggtgtcctttctacattcgtgtcagctgcccgacaaggtgttgttgataccgatgttgacacaaaggatgttattgaatgtctcaaactttcacatcactctgacttagaagtgacaggtgacagttgtaacaatttcatgctcacctataataaggttgaaaacatgacgcccagagatcttggcgcatgtattgactgtaatgcaaggcatatcaatgcccaagtagcaaaaagtcacaatgtttcactcatctggaatgtaaaagactacatgtctttatctgaacagctgcgtaaacaaattcgtagtgctgccaagaagaacaacataccttttagactaacttgtgctacaactagacaggttgtcaatgtcataactactaaaatctcactcaagggtggtaagattgttagtacttggtttaaacttatgcttaaggccacattattgtgcgttcttgctgcattggtttgttacatcgttatgccattacatactttgtcaatccatgatggttacacaaatgaaatcattggttacaaagccattcaggatggtgtcactcgtgacatcatttctactgatgattgttttgcaaataaacatgctggttttgacgcactggtttagccagcgtggtggttcatacaaaaatgacaaaagctgccctgtagtagctgctatcattacaagagagattggtttcatagtgcctggcttaccgggtactgtgntgagagcaatcaatggtgacttcttgcattttctacctcgtgtttttagtgctgttggcaacatttgctacacaccttccaaactcattgagtatagtgattttgctacctctgcttgcgttcttgctagcagagtgtacaatttttaaggatgctatgggcaaacctgtgccatattgttatgacactaatttgctagagggttctatttcttatagtgagcttcgtccagacactcgttatgtgcttatggatggttccatcatacagtttcctaacatttacctggagggttctgttagagtagtaacaacttttgatgctgagtactgtagacatggtacatgcgaaaggtcagaagcaggtatttgcctatctaccagtggtagatgggttcttaataatgagcattacagagctctatcaggagttttctgtggtgttgatgcgatgaatctcatagctaacatctttactcctcttgtgcaacctgtgggtgctttagatgtgtctgcttcagtagtggctggtggtattattgccatattggtgacttgtgctgcctactactttatgaaattcagacgtgcttttggtgagtacaaccatgttgttgctgctaatgcacttttgtttttgatgtctttcactatactctgtctggcaccagcttacagctttctgccgggagtctactcagtcttttacttgtacttgacattctatttcaccaatgatgtttcattcttggctcaccttcaatggtttgccatgttttctcctattgtgcctttttggataacagcaatctatgtattctgtatttctctgaagcactgccattggttctttaacaactatcttaggaaaagagtcatgtttaatggagttacatttagtaccttcgaggaggctgctttgtgtacctttttgctcaacaaggaaatgtacctaaaattgcgtagcgagacactgttgccacttacacagtataacaggtatcttgctctatataacaagtacaagtatttcagtggagccttagatactaccagctatcgtgaagcagcttgctgccacttagcaaaggctctaaatgactttagcaactcaggtgctgatgttctctaccaaccaccacagacatcaatcacttctgctgttctgcagagtggttttaggaaaatggcattcccgtcaggcaaagttgaaggatgcatggtacaagtaacctgtggaactacaactcttaatggattgtggttggatgacacagtatactgtccaagacatgtcatttgcacagcagaagacatgcttaatcctaactatgaagatctgctcattcgcaaatccaaccatagctttcttgttcaggctggcaatgttcaacttcgtgttattggccattctatgcaaaattgtctgcttaggcttaaagttgatacttctaaccctaagacacccaagtataaatttgtccgtatccaacctggtcaaacattttcagttctagcatgctacaatggttcaccatctggtgtttatcagtgtgccatgagacctaatcataccattaaaggttctttccttaatggatcatgtggtagtgttggttttaacattgattatgattgcgtgtctttctgctatatgcatcatatggagcttccaacaggagtacacgctggtactgacttagaaggtaaattctatggtccatttgttgacagacaaactgcacaggctgcaggtacagacacaaccataacattaaatgttttggcatggctgtatgctgctgttatcaatggtgataggtggtttcttaatagattcaccactactttgaatgactttaaccttgtggcaatgaagtacaactatgaacctttgacacaagatcatgttgacatattgggacctctttctgctcaaacaggaattgccgtcttagatatgtgtgctgctttgaaagagctgctgcagaatggtatgaatggtcgnnnnnnnnnnnnnnnnnnnnnnnnnnnnnnnnnnnnnnnnnnnnnnnnnnnnnnnnnnnnnnnnnnnnnnnnnnnnnnnnnnnnnnnnnnnnnnnnnnnnaagaaaattgttaagggcactcatcattggatgcttttaactttcttgacatcactattgattcttgttcaaagtacacagtggtcactgtttttcttgtttacgagaatgctttcttgccatttactcttggtattatggcaattgctgcatgtgctatgctgcttgttaagcataagcacgcattcttgtgcttgtttctgttaccttctcttgcaacagttgcttactttaatatggtctacatgcctgctagctgggtgatgcgtatcatgacatggcttgaattggctgacactagcttgtctggttataggcttaaggattgtgttatgtatgcttcagctttagttttgcttattctcatgacagctcgcactgtttatgatgatgctgctagacgtgtttggacactgatgaatgtcattacacttgtttacaaagtctactatggtaatgctttagatcaagctatttccatgtgggccttagttatttctgtaacctctaactattctggtgtcgttacgactatcatgtttttagctagagctatagtgtttgtgtgtgttgagtattacccattgttatttattactggcaacaccttacagtgtatcatgcttgtttattgtttcttaggctattgttgctgctgctactttggccttttctgtttactcaaccgttacttcaggcttactcttggtgtttatgactacttggtctnnnnnnnnnnnnnnnnnnnnnnnnnnnnnnnnnnnnnnnnnnnnnnnnnnnnnnnnnnnnnnnnnnnnnnnnnnnnnnnnnnnnnnnnnnnnnnnnnnnnctgacgtaaagtgcacatctgtggtactgctctcggttcttcaacaacttagagtagagtcatcttctaaattgtgggcacaatgtgtacaactccacaatgatattcttcttgcaaaagacacaactgaagctttcgagaagatggtttctcttttgtctgttttgctatccatgccagggtgctgtagacattaataggttgtgcgaggaaatgctcgataaccgtgctactcttcagggctattgcttcagaatttagttctttaccatcatatgccgcttatgccactgcccaggaggcctatgagcaggctgtagctaatggtgattctgaagtcgttctcaaaaagttaaagaaatctttgaatgtggctaaatctgagtttgaccgtgatgctgccatgcaacgcaagttggaaaagatggcagatcaggctatgacccaaatgtacaaacaggcaagatctgaggacaagagggcaaaagtaactagtgctatgcaaacaatgctcttcactatgcttaggaagcttgataatgatgcacttaacaacattatcaacaatgcgcgtgatggttgtgttccactcaacatcataccattgactacagcagccaaactcatggttgttgtccctgattatggtacctacaagaacacttgtgatggtaacacctttacatatgcatctgcactctgggaaatccagcaagttgttgatgcggatagcaagattgttcaacttagtgaaattaacatggacaattcaccaaatttggcttggcctcttattgttacagctctaagagccaactcagctgttaaactacagaataatgaactgagtccagtagcactacgacagatgtcctgtgcggctggtaccacacaaacagcttgtactgatgacaatgcacttgcctactataacaattcgaagggaggtaggtttgtgctggcattactatcagaccaccaagatctcaaatgggctagattccctaagagtgatggtacaggtacaattacacagaactggaaccaccttgtaggtttgttacagacacaccaaaagggcctaaagtgaaatacttgtacttcatcaaaggcttaaacaacctaaatagaggtatggtgctgggcagtttagctgctacagtacgtcttcaggctggaaatgctacagaagtacctgccaattcaactgtgctttccttctgtgcttttgcagtagaccctgctaaagcatataaggattacctagcaagtggaggacaaccaatcaccaactgtgtgaagatgttgtgtacacacactggtacaggacaggcaattactgtaacaccagaagctaacatggaccaagagtcctttggtggtgcttcatgttgtctgtattgtagatgccacattgaccatccaaatcctaaaggattctgtgacttgaaaggtaagtacgtccaaatacctaccacttgtgctaatgacccagtgggttttacacttagaaacacagtctgtaccgtctgcggaatgtggaaaggttatggctgtagttgtgaccaactccgcgaacccttgatgcagtctgcggatgcatcaacgtttttaaacgggtttgcggtgtaagtgcagcccgtcttacaccgtgcggcacaggcactagtactgatgtcgtctacagggcttttgatatttacaacgaaaaagttgctggttttgcaaagttcctaaaaactaattgctgtcgcttccaggagaaggatgaggaaggcaatttattagactcttactttgtagttaagaggcatactatgtctaactaccaacatgaagagactatttataacttggttaaagattgtccagcggttgctgtccatgactttttcaagtttagagtagatggtgacatggtaccacatatatcacgtcagcgtctaactaaatacacaatggctgatttagtctatgctctacgtcattttgatgagggtaattgtgatacattaaaagaaatactcgtcacatacaattgctgtgatgatgattatttcaataagaaggattggtatgacttcgtagagaatcctgacatcttacgcgtatatgctaacttaggtgagcgtgtacgccaatcattattaaagactgtacaattctgcgatgctatgcgtgatgcaggcattgtaggcgtactgacattagataatcaggatcttaatgggaactggtacgatttcggtgatttcgtacaagtagcaccaggctgcggagttcctattgtggattcatattactcattgctgatgcccatcctcactttgactagggcattggctgctgagtcccatatggatgctgatctcgcaaaaccacttattaagtggggatttgctgaaatatgattttacggaagagagactttgtctcttcgaccgttattttaaatattgggaccagacataccatcccaattgtattaactgtttggatgataggtgtatccttcattgtgcaaactttaatgtgttattttctactgtgtttccacctacaagttttggaccactagtaagaaaaatatttgtagatggtgttccttttgttgtttcaactggataccattttcgtgagttaggagtcgtacataatcaggatgtaaacttacatagctcgcgtctcagtttcaaggaacttttagtgtatgctgctgatccagctatgcatgcagcttctggcaatttattgctagataaacgcactacatgcttttcagtagctgcactaacaaacaatgttgcttttcaaactgtcaaacccggtaattttaataaagacttttatgactttgctgtgtctaaaggtttctttaaggaaggaagttctgttgaactaaaacacttcttctttgctcaggatggcaacgctgctatcagtgattatgactattatcgttataatctgccaacaatgtgtgatatcagacaactcctattcgtagttgaagttgttgataaatactttgattgttacgatggtggctgtattaatgccaaccaagtaatcgttaacaatctggataaatcagctggtttcccatttaataaatggggtaaggctagactttattatgactcaatgagnnnnnnnnnnnnnnnnnnnnnnnnnnnnnnnnnnnnnnnnnnnnnnnnnnnnnnnnnnnnnnnnnnnnnnnnnnnnnnnnnnnnnnnnnnnnnnnnnnnntactataactcaaatgaatcttaagtatgccattagtgcaaagaatagagctcgcaccgtagctggtgtctctatctgtagtactatgacaaatagacagtttcatcagaaattattgaagtcaatagccgccactagaggagctactgtggtaattggaacaagcaagttttacggtggctggcataatatgttaaaaactgtttacagtgatgtagaaactccacaccttatgggttgggattatccaaaatgtgacagagccatgcctaacatgcttaggataatggcctctcttgttcttgctcgcaaacataacacttgctgtaacttatcacaccgtttctacaggttagctaacgagtgtgcgcaagtattaagtgagatggtcatgtgtggcggctcactatatgttaaaccaggtggaacatcatccggtgatgctacaactgcttatgctaatagtgtctttaacatttgtcaagctgttacagccaatgtaaatgcacttctttcaactgatggtaataagatagctgacaagtatgtccgcaatctacaacacaggctctatgagtgtctctatagaaatagggatgttgatcatgaattcgtggatgagttttacgcttacctgcgtaaacatttctccatgatgattctttctgatgatgccgttgtgtgctataacagtaactatgcggctcaaggtttagtagctagcattaagaactttaaggcagttctttattatcaaaataatgtgttcatgtctgaggcaaaatgttggactgagactgaccttactaaaggacctcacgaattttgctcacagcatacaatgctagttaaacaaggagatgattacgtgtacctgccttacccagatccatcaagaatattaggcgcaggctgttttgtcgatgatattgtcaaaacagatggtacacttatgattgaaaggttcgtgtcactggctattgatgcttacccacttacaaaacatcctaatcaggagtatgctgatgtctttcacttgtatttacaatacattagaaagttacatgatgagcttactggccacatgttggacatgtattccgtaatgctaactaatgataacacctcacggtactgggaacctgagttttatgaggctatgtacacaccacatacagtcttgcaggctgtaggtgcttgtgtattgtgcaattcacagacttcacttcgttgcggtgcctgtattaggagaccattcctatgttgcaagtgctgctatgaccatgtcatttcaacatcacacaaattagtgttgtctgttaatccctatgtttgcaatgccccaggttgtgatgtcactgatgtgacacaactgtatctaggaggtatgagctattattgcaagtcacataagcctcccattagttttccattatgtgctaatggtcaggtttttggtttatacaaaaacacatgtgtaggcagtgacaatgtcactgacttcaatgcgatagcaacatgtgattggactaatgctggcaattacatacttgccaacacttgtactgagagactcaagcttttcgcagcagaaacgctcaaagccactgaggaaacatttaagctgtcatatggtattgccactgtacgcgaagtactctctgacagagaattgcatctttcatgggaggttggaaaacctagaccaccattgaacagaaactatgtctttactggttaccgtgtaactaaaaatagtaaagtacagattggagagtacacctttgaaaaaggtgactatggtgatgctgttgtgtacagaggtactacgacatacaagttgaatgttggtgattactttgtgttgacatctcacactgtaatgccacttagtgcacctactctagtgccacaagagcactatgtgagaattactggcttgtacccaacactcaacatctcagatgagttttctagcaatgttgcaaattatcaaaaggtcggcatgcaaaagtactctacactccaaggaccacctggtactggtaagagtcattttgccatcggacttgctctctattacccatctgctcgcatagtgtatacggcatgctctcatgcagctgttgatgccctatgtgaaaaggcatcaaaatatttgcccatagataaatgtagtagaatcatacctgcgcgtgcgcgcgtagagtgttttgataaattcaaagtgaattcaacactagaacagtatgttttctgcactgtaaatgcattgccagaaacaactgctgacattgtagtctttgatgaaatctctatggctactaattatgacttgagtgttgtcaatgctagacttcgtgcaaaacactacgtctatattggcgatcctgctcaattaccagccccccgcacattgctgactaaaggcacactagaaccagaatattttaattcagtgtgcagacttatgaaaacaataggtccagacatgttccttggaacttgtcgccgttgtcctgctgaaattgttgacactgtgagtgctttagtttatgacaataagctaaaagcacacaaggagaagtcagctcaatgcttcaaaatgttctacaaaggtgttattacacatgatgtttcatctgcaatcaacagacctcaaataggcgttgtaagagaatttcttacacgcaatcctgcttggagaaaagctgtttttatctcaccttataattcacagaacgctgtagcttcaaaaatcttaggattgcctacgcagactgttgattcatcacagggttctgaatatgactatgtcatattcacacaaactactgaaacagcacactcttgtaatgtcaaccgcttcaatgtggctatcacaagggcaaaaattggcattttgtgcataatgtctgatagagatctttatgacaaactgcaatttacaagtctagaaataccacgtcgcaatgtggctacattacaagcagaaaatgtaactggactttttaaggactgtagtaagatcattactggtcttcatcctacacaggcacctacacacctcagcgttgatataaagttcaagactgaaggattatgtgttgacataccaggcataccaaaggacatgacctaccgtagactcatctctatgatgggtttcaaaatgaattaccaagtcaatggttatcctaatatgtttatcacccgcgaagaagctattcgtcacgttcgtgcgtggattggctttgatgtagagggctgtcatgcaactagagatgctgtgggtactaacctacctctccagctaggattttctacaggtgttaacttagtagctgtaccgactggttatgttgacactgaaaataacacagaattcaccagagttaatgcaaaacctccaccaggtgaccagtttaaacatcttataccactcatgtataaaggcttgccctggaatgtagtgcgtattaagatagtacaaatgctcagtgatacactgaaaggattgtcagacagagtcgtgttcgtcctttgggcgcatggctttgagcttacatcaatgaagtactttgtcaagattggacctgaaagaacgtgttgtctgtgtgacaaacgtgcaacttgcttttctacttcatcagatacttatgcctgctggaatcattctgtgggttttgactatgtctataacccatttatgattgatgttcagcagtggggctttacgggtaaccttcagagtaaccatgaccaacattgccaggtacatggaaatgcacatgtggctagttgtgatgctatcatgactagatgtttagcagtccatgagtgctttgttaagcgcgttgattggtctgttgaataccctattataggagatgaactgagggttaattctgcttgcagaaaagtacaacacatggttgtgaagtctgcattgcttgctgataagtttccagttcttcatgacattggaaatccaaaggctatcaaagtgtgtgcctcaggctgaagtagaatggaagttctacgatgctcagccatgtagtgacaaagcttacaaaatagaggaactcttctattcttatgctacacatcacgataaattcactgatggtgtttgtttgttttggaattgtaacgttgatcgttacccagccaatgcaattgtgtgtaggtttgacacaagagtcttgtcaaacttgaacttaccaggctgtgatggtggtagtttgtatgtgaataagcatgcattccacactccagctttcgataaaagtgcatttactaatttaaagcaattgcctttcttttactattctgatagtccttgtgagtctcatggcaaacaagtagtgtcggatattgattatgttccactcaaatctgctacgtgtattacacgatgcaatttaggtggtgctgtttgcagacaccatgcaaatgagtaccgacagtacttggatgcatataatatgatgatttctgctggatttagcctatggatttacaaacaatttgatacttataacctgtggaatacatttaccaggttacagagtttagaaaatgtggcttataatgttgttaataaaggacactttgatggacacgccggcgaagcacctgtttccatcattaataatgctgtttacacaaaggtagatggtattgatgtggagatctttgaaaataagacaacacttcctgttaatgttgcatttgagctttgggctaagcgtaacattaaaccagtgccagagattaagatactcaataatttgggtgttgatatcgctgctaatactgtaatctgggactacaaaagagaagccccagcacatgtatctacaataggtgtctgcacaatgactgacattgccaagaaacctactgagagtgcttgttcttcacttactgtcttgtttgatggtagagtggaaggacaggtagacctttttagaaacgcccgtaatggtgttttaataacagaaggttcagtcaaaggtctaacaccttcaaagggaccagcacaagctagcgtcaatggagtcacattaattggagaatcagtaaaaacacagtttaactactttaagaaagtagacggcattattcaacagttgcctgaaacctactttactcagagcagagacttagaggattttaagcccagatcacaaatggaaactgactttctcgagctcgctatggatgaattcatacagcgatataagctcgagggctatgccttcgaacacatcgtttatggagatttcagtcatggacaacttggcggtcttcatttaatgataggcttagccaagcgctcacaagattcaccacttaaattagaggattttatccctatggacagcacagtgaaaaattacttcataacagatgcgcaaacaggttcatcaaaatgtgtgtgttctgtgattgatcttttacttgatgactttgtcgagataataaagtcacaagatttgtcagtgattncaaaagtggtcaaggttacaattgactatgctgaaatttcattcatgctttggtgtaaggatggacatgttgaaaccttctacccaaaactacaagcaagtcaagcgtggcaaccaggtgttgcgatgcctaacttgtacaagatgcaaagaatgcttcttgaaaagtgtgaccttcagaattatggtgaaaatgctgttataccaaaaggaataatgatgaatgtcgcaaagtatactcaactgtgtcaatacttaaatacacttactttagctgtaccctacaacatgagagttattcactttggtgctggctctgataaaggagttgcaccaggtacagctgtnctcagacaatggttgccaactggcacactacttgtcgattcagatcttaatgacttcgtctccgacgcagattctactttaattggagactgtgcaacagtacatacggctaataaatgggaccttattattagcgatatgtatgaccctaagaccaaacatgtgacaaaagagaatgactctaaagaagggtttttcacttatctgtgtggatttataaagcaaaaactagccctgggtggttctatagctgtaaagataacagagcattcttggaatgctgacctttacaagcttatgggccatttctcatggtggacagcttttgttacaaatgtaaatgcatcatcatcggaagcatttttaattggggctaactatcttggcaagccgaaggaacaaattgatggctataccatgcatgctaactacattttctggaggaacacaaatcctatccagttgtcttcctattcacnnnnnnnnnnnnnnnnnnnnnnnnnnnnnnnnnnnnnnnnnnnnnnnnnnnnnnnnnnnnnnnnnnnnnnnnnnnnnnnnnnnnnnnnnnnnnnnnnnnnttattaacaattctactaatgttgttatacgagcatgtaactttgaattgtgtgacaaccctttctttgctgtttctaaacccatgggtacacagacacatactatgatattcgataatgcatttaattgcactttcgagtacatatctgatgccttttcgcttgatgtttcagaaaagtcaggtaattttaaacacttacgagagtttgtgtttaaaaataaagatgggtttctctatgtttataagggctatcaacctatagatgtagttcgtgatctaccttctggttttaacactttgaaacccatttttaagttgcctcttggtattaacattacaaattttagagccattcttacagcctttttacctgctcaagacacttggggcacgtcagctgcagcctattttgttggctatttaaagccaactacatttatgctcaagtatgatgaaaatggtacaatcacagatgctgttgattgttctcaaaatccacttgctgaactcaaatgctctgttaagagctttgagattgacaaaggaatttaccagacctctaatttcagggttgttccctcaagagatgttgtgagattccctaatattacaaacttgtgtccttttggagaggtttttaatgctactaaattcccttctgtctatgcatgggagaggaaaagaatttctaattgtgttgctgattactctgtgctctacaactcaacatttttttcaacctttaagtgctatggcgtttctgccactaagttgaatgatctttgcttctccaatgtctatgcagattcttttgtagtcaagggagatgatgtaagacaaatagcgccaggacaaactggtgttattgctgattataattataaattgccagatgatttcatgggttgtgtccttgcttggaatactaggaacattgatgctacttcaactggtaattataattataaatataggtatcttagacatggcaagcttaggccctttgagagagacatatctaatgtgcctttctcccctgatggcaaaccttgcaccccacctgctcttaattgttattggccattaaatgattatggtttttacaccactactggcattggctaccaaccttacagagttgtagtactttcttttgaacttttaaatgcaccggccacggtttgtggaccaaaattatccactgaccttattaagaaccagtgtgtcaattttaattttaatggactcactggtactggtgtgttaactccttcttcaaagagatttcaaccatttcaacaatttggccgtgatgtttctgatttcactgattccgttcgagatcctaaaacatctgaaatattagacatttcaccttgctcttttgggggtgtaagtgtaattacacctggaacaaatgcttcatctgaagttgctgttctatatcaagatgttaactgcactgatgtttctacagcaattcatgcagatcaactcacaccagcttggcgcatatattctactggaaacaatgtattccagactcaagcaggctgtcttataggagctgagcatgtcgacacttcttatgagtgcgacattcctattggagctggcatttgtgctagttaccatacagtttctttattacgtagtactagccaaaaatctattgtggcttatactatgtctttaggtgctgatagttcaattgcttactctaataacaccattgctatacctactaacttttcaattagcattactacagaagtaatgcctgtttctatggctaaaacctccgtagattgtaatatgtacatctgcggagattctactgaatgtgctaatttgcttctccaatatggtagcttttgcacacaactaaatcgtgcactctcaggtattgctgctgaacaggatcgcaacacacgtgaagtgttcgctcaagtcaaacaaatgtacaaaaccccaactttgaaagattttggtggttttaatttttcacaaatattacctgaccctctaaagccaactaagaggtcttttattgaggacttgctctttaataaggtgacactcgctgatgctggcttcatgaagcaatatggcgaatgcctaggtgatattaatgctagagatctcatttgtgcgcagaagttcaatggacttacagtgttgccacctctgctcactgatgatatgattgctgcctacactgctgctctagttagtggtactgccactgctggatggacatttggtgctggcgctgctcttcaaataccttttgctatgcaaatggcatataggttcaatggcattggagttacccaaaatgttctctatgagaaccaaaaacaaatcgccaaccaatttaacaaggcgattagtcaaattcaagaatcacttacaacaacatcaactgcattgggcaagctgcaagacgttgttaaccagaatgctcaagcattaaacacacttgttaaacaacttagctctaattttggtgcaatttcaagtgtgctaaatgatatcctttcgcgacttgataaagtcgaggcggaggtacaaattgacaggttaattacaggcagacttcaaagccttcaaacctatgtaacacaacaactaatcagggctgctgaaatcagggcttctgctaatcttgctgctactaaaatgtctgagtgtgttcttggacaatcaaaaagagttgacttttgcggaaagggctaccaccttatgtccttcccacaagcagccccgcatggtgttgtcttcctacatgtcacgtatgtgccatcccaggagaggaacttcaccacagcgccagcaatttgtcatgaaggcaaagcatacttccctcgtgaaggtgtttttgtgtttaatggcacttcttggtttattacacagaggaacttcttttctccacaaataattactacagacaatacatttgtctcaggaaattgtgatgtcgttattggcatcattaacaacacagtttatgatcctctgcaacctgagcttgactcattcaaagaagagctggacaagtacttcaaaaatcatacatcaccagatgttgatcttggcgacatttcaggcattaacgcttctgtcgtcaacattcaagaagaaattgaccgcctcaatgaggtcgctaaaaatttaaatgaatcactcattgaccttcaagaattgggaaaatatgagcaatatattaaatggccttggtatgtttggctcggcttcattgctggactaattgccatcgtcatggttacaatcttgctttgttgcatgactagttgttgcagttgcctcaagggtgcatgctcttgtggttcttgctgcaagtttgatgaggatgactctgagccagttctcaagggtgtcaaattacattacacataaacgaacttatggatttgtttatgagattttttactcttggatcaattactgcacagccagtaaaaattgagcaatgcttctcctgcaagtactgttcatgctacagcaacgataccgctacaagcctcactccctttcggatggcttgttattggcgttgcatttcttgctgtttttcagagcgctaccaaaataattgcgctcaataaaagatggcagctagccctttataagggcttccagttcatttgcaatttactgctgctatttgttaccatctattcacatcttttgcttgtcgctgcaggtatggaggcgcaatttttgtagcctctatgccttgatatattttctacaatgcatcaacgcatgtagaattattatgagatgttggctttgttggaagtgcaaatccaagaacccattactttatgatgccaactactttgtttgctggcacacacataactatgactactgtataccatataacagtgtcacagatacaattgtcgttactgcaggtgacggcatttcaacaccaaaactcaaagaagactaccaaattggtggttattctgaggattggcactcaggtgttaaagactatgtcgttgtacatggctatttcaccgaagtttactaccagcttgagtctacacaaattactacagacactggtattgaaaatgctacattcttcatctttaacaagcttgttaaagacccaccgaatgtgcaaatacacacaatcgacggctcttcaggagttgcnaatccagcaatggatccnatttatgatgagccgacgacgactactagcgtgcctttgtaagcacaagaaagtgagtacgaacttatgtactcattcgtttcggaagaaacaggtacgttaatagttaatagcgtacttctttttcttgctttcatggtattcttgctagtcacactagccatccttactgcgcttcgattgtgtgcgtactgctgcaatattgttaacgtgagtttagtaaaaccaacggtttacgtctactcgcgtgttaaaaatctgaactcttctgaaggagttcctgatcttctggtctaaacgaactaactattattattattctgtttggaactttaacattgcttatcatggcagacaacggtactattaccgttgaggagcttaaacaactcctggaacaatggaacctagtaataggtttcctattcctagcctggattatgttactacaatttgcctattctaatcggaacaggtttttgtacataataaagcttgttttcctctggctcttgtggccagtaacacttgcttgctttgtgcttgctgctgtctacagaattaattgggtgactggcgggattgcgattgcaatggcttgtattgtaggcttgatgtggcttagctacttcgttgcttccttcaggctgtttgctcgtacccgctcaatgtggtcattcaacccagaaacaaacattcttctcaatgtgcctctccgggggacaattgtgaccagaccgctcatggaaagtgaacttgtcattggtgctgtgatcattcgtggtcacttgcgaatggccggacactccctagggcgctgtgacattaaggacctgccaaaagagatcactgtggctacatcacgaacgctttcttattacaaannnnnnnnnnnnnnnnnnnnnnnnnnnnnnnnnnnnnnnnnnnnnnnnnnnnnnnnnnnnnnnnnnnnnnnnnnnnnnnnnnnnnnnnnnnnnnnnnnnntgcatacaaccgctaccgtattggaaactataaattaaatacagaccacgccggtagcaacgacaatattgctttgctagtacagtaagtgacaacagatgtttcatcttgttgacttccaggttacaatagcagagatattgattatcattatgaggactttcaggattgctatttggaatcttgacgttataataagttcaatagtgagacaattatttaagcctctaactaagaagaattattcggagttagatgatgaagaacctatggagttagattatccataaaacgaacatgaaaattattctcttcctgacattgattgtatttacatcttgcgagctatatcactatcaggagtgtgttagaggtacgactgtactactaaaagaaccttgcccatcaggaacatacgagggcaattcaccatttcaccctcttgctgacaataaatttgcactaacttgcactagcacacactttgcttttgcttgtgctgacggtactcgacatacctatcagctgcgtgcaagatcagtttcaccaaaacttttcatcagacaagaggaggttcaacaagagctctactcgccactttttctcattgttgctgctctagtatttttaatactttgcttcaccattaagagaaagacagaatgaatgagctcactttaattgacttctatttgtgctttttagcctttctgctattccttgttttaataatgcttattatattttggttttcactcgaaatccaggatctagaagaaccttgtaccaaagtctaaacgaacatgaaacttctcattgttttgacttgtatttctctatgcagttgcatacgcactgtagtacagcgctgtgcatctaataaacctcatgtgcttgaagatccttgtcctactggttaccaacctgaatggaatataaggtacaacactaggggtaatacttatagcactgcttggctttgtgctctaggaaaggttttaccttttcatagatggcacactatggttcaaacatgcacacctaatgttactatcaactgtcaagatccagctggtggtgcgcttatagcctaggtgttggtaccttcatgaaggtcaccaaactgctgcatttagagacgtatttgttgttttaaataaacgaacaaattaaaatgtctgataatggaccccaatcaaaccaacgtagtgccccccgcattacatttggtggacccacagattcaactgacaataaccagaatggaggacgcaatggggcaaggccaaaacagcgccgaccccaaggtttacccaataatactgcgtcttggttcacagctctcactcagcatggcaaggaggaacttagattccctcgaggccagggcgttccaatcaacaccaatagtggtccagatgaccaaattggctactaccgaagagctacccgacgagttcgtggtggtgacggcaaaatgaaagagctcagccccagatggtacttctattacctaggaactggcccagaagcttcacttccctacggcgctaacaaagaaggcatcgtatgggttgcaactgagggagccttgaatacacccaaagaccacattggcacccgcaatcctaatnacaatgctgccaccgtgctacaacttcctcaaggaacaacattgccaaaaggcttctacgcagagggaagcagaggcggcagtcaagcctcttctcgctcctcatcacgtagtcgcggtaattcaagaaattcaactcctggcagcagtaggggaaattctcctgctcgaatggctagcggaggtggtgaaactgccctcgcgctattgctgctagacagattgaaccagcttgagagcaaagtttctggtaaaggccaacaacaacaaggccaaactgtcactaagaaatctgctgctgaggcatctaaaaagcctcgccaaaaacgtactgccacaaaacagtacaacgtcactcaagcatttgggagacgtggtccagaacaaacccaaggaaatttcggggaccaagacctaatcagacaaggaactgattacaaacattggccgcaaattgcacaatttgctccaagtgcctctgcattctttggaatgtcacgcattggcatggaagtcacaccttcgggaacatggctgacttatcatggagccattaaattggatgacaaagatccacaattcaaagacaacgtcatactgctgaacaagcacattgacgcatacaaaacattcccaccaacagagcctaaaaaggacaaaaagaaaaagactgatgaagctcagcctttgccgcagagaccaaagaagcagcccactgtgactcttcttcctgcggctgacatggatgatttctccagacaacttcaaaattccatgagtggagcttctgctgattcaactcaggcataaacactcatgatgaccacacaaggcagatgggctatgtaaacgttttcgcaattccgtttacgatacatagtctactcttgtgcagaatgaattctcgtaactaaacagcacaagtaggtttagttaactttaatctcacatagcaatctttaatcaatgtgtaacattagggaggacttgaaagagccaccacattttcatcgaggccacgcggagtacgatcgagggtacagtgaataatgctagggagagctgc

SEQ ID NO: 61 - DNA, 29742 bp, Coronavirus
atattaggtttttacctacccaggaaaagccaaccaacctcgatctcttgtagatctgttctctaaacgaactttaaaatctgtgtagctgtcgctcggctgcatgcctagtgcacctacgcagtataaacaataataaattttactgtcgttgacaagaaacgagtaactcgtccctcttctgcagactgcttacggtttcgtccgtgttgcagtcgatcatcagcatacctaggtttcgtccgggtgtgaccgaaaggtaagatggagagccttgttcttggtgtcaacgagaaaacacacgtccaactcagtttgcctgtccttcaggttagagacgtgctagtgcgtggcttcggggactctgtggaagaggccctatcggaggcacgtgaacacctcaaaaatggcacttgtggtctagtagagctggaaaaaggcgtactgccccagcttgaacagccctatgtgttcattaaacgttctgatgccttaagcaccaatcacggccacaaggtcgttgagctggttgcagaaatggacggcattcagtacggtcgtagcggtataacactgggagtactcgtgccacatgtgggcgaaaccccaattgcataccgcaatgttcttcttcgtaagaacggtaataagggagccggtggtcatagctatggcatcgatctaaagtcttatgacttaggtgacgagcttggcactgatcccattgaagattatgaacaaaactggaacactaagcatggcagtggtgcactccgtgaactcactcgtgagctcaatggaggtgcagtcactcgctatgtcgacaacaatttctgtggcccagatgggtaccctcttgattgcatcaaagattttctcgcacgcgcgggcaagtcaatgtgcactctttccgaacaacttgattacatcgagtcgaagagaggtgtctactgctgccgtgaccatgagcatgaaattgcctggttcactgagcgctctgataagagctacgagcaccagacacccttcgaaattaagagtgccaagaaatttgacactttcaaaggggaatgcccaaagtttgtgtttcctcttaactcaaaagtcaaagtcattcaaccacgtgttgaaaagaaaaagactgagggtttcatggggcgtatacgctctgtgtaccctgttgcatctccacaggagtgtaacaatatgcacttgtctaccttgatgaaatgtaatcattgcgatgaagtttcatggcagacgtgcgactttctgaaagccacttgtgaacattgtggcactgaaaatttagttattgaaggacctactacatgtgggtacctacctactaatgctgtagtgaaaatgccatgtcctgcctgtcaagacccagagattggacctgagcatagtgttgcagattatcacaaccactcaaacattgaaactcgactccgcaagggaggtaggactagatgttttggaggctgtgtgtttgcctatgttggctgctataataagcgtgcctactgggttcctcgtgctagtgctgatattggctcaggccatactggcattactggtgacaatgtggagaccttgaatgaggatctccttgagatactgagtcgtgaacgtgttaacattaacattgttggcgattttcatttgaatgaagaggttgccatcattttggcatctttctctgcttctacaagtgcctttattgacactataaagagtcttgattacaagtctttcaaaaccattgttgagtcctgcggtaactataaagttaccaagggaaagcccgtaaaaggtgcttggaacattggacaacagagatcagttttaacaccactgtgtggttttccctcacaggctgctggtgttatcagatcaatttttgcgcgcacacttgatgcagcaaaccactcaattcctgatttgcaaagagcagctgtcaccatacttgatggtatttctgaacagtcattacgtcttgtcgacgccatggtttatacttcagacctgctcaccaacagtgtcattattatggcatatgtaactggtggtcttgtacaacagacttctcagtggttgtctaatcttttgggcactactgttgaaaaactcaggcctatctttgaatggattgaggcgaaacttagtgcaggagttgaatttctcaaggatgcttgggagattctcaaatttctcattacaggtgtttttgacatcgtcaagggtcaaatacaggttgcttcagataacatcaaggattgtgtaaaatgcttcattgatgttgttaacaaggcactcgaaatgtgcattgatcaagtcactatcgctggcgcaaagttgcgatcactcaacttaggtgaagtcttcatcgctcaaagcaagggactttaccgtcagtgtatacgtggcaaggagcagctgcaactactcatgcctcttaaggcaccaaaagaagtaacctttcttgaaggtgattcacatgacacagtacttacctctgaggaggttgttctcaagaacggtgaactcgaagcactcgagacgcccgttgatagcttcacaaatggagctatcgtcggcacaccagtctgtgtaaatggcctcatgctcttagagattaaggacaaagaacaatactgcgcattgtctcctggtttactggctacaaacaatgtctttcgcttaaaagggggtgcaccaattaaaggtgtaacctttggagaagatactgtttgggaagttcaaggttacaagaatgtgagaatcacatttgagcttgatgaacgtgttgacaaagtgcttaatgaaaagtgctctgtctacactgttgaatccggtaccgaagttactgagtttgcatgtgttgtagcagaggctgttgtgaagactttacaaccagtttctgatctccttaccaacatgggtattgatcttgatgagtggagtgtagctacattctacttatttgatgatgctggtgaagaaaacttttcatcacgtatgtattgttccttttaccctccagatgaggaagaagaggacgatgcagagtgtgaggaagaagaaattgatgaaacctgtgaacatgagtacggtacagaggatgattatcaaggtctccctctggaatttggtgcctcagctgaaacagttcgagttgaggaagaagaagaggaagactggctggatgatactactgagcaatcagagattgagccagaaccagaacctacacctgaagaaccagttaatcagtttactggttatttaaaacttactgacaatgttgccattaaatgtgttgacatcgttaaggaggcacaaagtgctaatcctatggtgattgtaaatgctgctaacatacacctgaaacatggtggtggtgtagcaggtgcactcaacaaggcaaccaatggtgccatgcaaaaggagagtgatgattacattaagctaaatggccctcttacagtaggagggtcttgtttgctttctggacataatcttgctaagaagtgtctgcatgttgttggacctaacctaaatgcaggtgaggacatccagcttcttaaggcagcatatgaaaatttcaattcacaggacatcttacttgcaccattgttgtcagcaggcatatttggtgctaaaccacttcagtctttacaagtgtgcgtgcagacggttcgtacacaggtttatattgcagtcaatgacaaagctctttatgagcaggttgtcatggattatcttgataacctgaagcctagagtggaagcacctaaacaagaggagccaccaaacacagaagattccaaaactgaggagaaatctgtcgtacagaagcctgtcgatgtgaagccaaaaattaaggcctgcattgatgaggttaccacaacactggaagaaactaagtttcttaccaataagttactcttgtttgctgatatcaatggtaagctttaccatgattctcagaacatgcttagaggtgaagatatgtctttccttgagaaggatgcaccttacatggtaggtgatgttatcactagtggtgatatcacttgtgttgtaataccctccaaaaaggctggtggcactactgagatgctctcaagagctttgaagaaagtgccagttgatgagtatataaccacgtaccctggacaaggatgtgctggttatacacttgaggaagctaagactgctcttaagaaatgcaaatctgcattttatgtactaccttcagaagcacctaatgctaaggaagagattctaggaactgtatcctggaatttgagagaaatgcttgctcatgctgaagagacaagaaaattaatgcctatatgcatggatgttagagccataatggcaaccatccaacgtaagtataaaggaattaaaattcaagagggcatcgttgactatggtgtccgattcttcttttatactagtaaagagcctgtagcttctattattacgaagctgaactctctaaatgagccgcttgtcacaatgccaattggttatgtgacacatggttttaatcttgaagaggctgcgcgctgtatgcgttctcttaaagctcctgccgtagtgtcagtatcatcaccagatgctgttactacatataatggatacctcacttcgtcatcaaagacatctgaggagcactttgtagaaacagtttctttggctggctcttacagagattggtcctattcaggacagcgtacagagttaggtgttgaatttcttaagcgtggtgacaaaattgtgtaccacactctggagagccccgtcgagtttcatcttgacggtgaggttctttcacttgacaaactaaagagtctcttatccctgcgggaggttaagactataaaagtgttcacaactgtggacaacactaatctccacacacagcttgtggatatgtctatgacatatggacagcagtttggtccaacatacttggatggtgctgatgttacaaaaattaaacctcatgtaaatcatgagggtaagactttctttgtactacctagtgatgacacactacgtagtgaagctttcgagtactaccatactcttgatgagagttttcttggtaggtacatgtctgctttaaaccacacaaagaaatggaaatttcctcaagttggtggtttaacttcaattaaatgggctgataacaattgttatttgtctagtgttttattagcacttcaacagcttgaagtcaaattcaatgcaccagcacttcaagaggcttattatagagcccgtgctggtgatgctgctaacttttgtgcactcatactcgcttacagtaataaaactgttggcgagcttggtgatgtcagagaaactatgacccatcttctacagcatgctaatttggaatctgcaaagcgagttcttaatgtggtgtgtaaacattgtggtcagaaaactactaccttaacgggtgtagaagctgtgatgtatatgggtactctatcttatgataatcttaagacaggtgtttccattccatgtgtgtgtggtcgtgatgctacacaatatctagtacaacaagagtcttcttttgttatgatgtctgcaccacctgctgagtataaattacagcaaggtacattcttatgtgcgaatgagtacactggtaactatcagtgtggtcattacactcatataactgctaaggagaccctctatcgtattgacggagctcaccttacaaagatgtcagagtacaaaggaccagtgactgatgttttctacaaggaaacatcttacactacaaccatcaagcctgtgtcgtataaactcgatggagttacttacacagagattgaaccaaaattggatgggtattataaaaaggataatgcttactatacagagcagcctatagaccttgtaccaactcaaccattaccaaatgcgagttttgataatttcaaactcacatgttctaacacaaaatttgctgatgatttaaatcaaatgacaggcttcacaaagccagcttcacgagagctatctgtcacattcttcccagacttgaatggcgatgtagtggctattgactatagacactattcagcgagtttcaagaaaggtgctaaattactgcataagccaattgtttggcacattaaccaggctacaaccaagacaacgttcaaaccaaacacttggtgtttacgttgtctttggagtacaaagccagtagatacttcaaattcatttgaagttctggcagtagaagacacacaaggaatggacaatcttgcttgtgaaagtcaacaacccacctctgaagaagtagtggaaaatcctaccatacagaaggaagtcatagagtgtgacgtgaaaactaccgaagttgtaggcaatgtcatacttaaaccatcagatgaaggtgttaaagtaacacaagagttaggtcatgaggatcttatggctgcttatgtggaaaacacaagcattaccattaagaaacctaatgagctttcactagccttaggtttaaaaacaattgccactcatggtattgctgcaattaatagtgttccttggagtaaaattttggcttatgtcaaaccattcttaggacaagcagcaattacaacatcaaattgcgctaagagattagcacaacgtgtgtttaacaattatatgccttatgtgtttacattattgttccaattgtgtacttttactaaaagtaccaattctagaattagagcttcactacctacaactattgctaaaaatagtgttaagagtgttgctaaattatgtttggatgccggcattaattatgtgaagtcacccaaattttctaaattgttcacaatcgctatgtggctattgttgttaagtatttgcttaggttctctaatctgtgtaactgctgcttttggtgtactcttatctaattttggtgctccttcttattgtaatggcgttagagaattgtatcttaattcgtctaacgttactactatggatttctgtgaaggttcttttccttgcagcatttgtttaagtggattagactcccttgattcttatccagctcttgaaaccattcaggtgacgatttcatcgtacaagctagacttgacaattttaggtctggccgctgagtgggttttggcatatatgttgttcacaaaattcttttatttattaggtctttcagctataatgcaggtgttctttggctattttgctagtcatttcatcagcaattcttggctcatgtggtttatcattagtattgtacaaatggcacccgtttctgcaatggttaggatgtacatcttctttgcttctttctactacatatggaagagctatgttcatatcatggatggttgcacctcttcgacttgcatgatgtgctataagcgcaatcgtgccacacgcgttgagtgtacaactattgttaatggcatgaagagatctttctatgtctatgcaaatggaggccgtggcttctgcaagactcacaattggaattgtctcaattgtgacacattttgcactggtagtacattcattagtgatgaagttgctcgtgatttgtcactccagtttaaaagaccaatcaaccctactgaccagtcatcgtatattgttgatagtgttgctgtgaaaaatggcgcgcttcacctctactttgacaaggctggtcaaaagacctatgagagacatccgctctcccattttgtcaatttagacaatttgagagctaacaacactaaaggttcactgcctattaatgtcatagtttttgatggcaagtccaaatgcgacgagtctgcttctaagtctgcttctgtgtactacagtcagctgatgtgccaacctattctgttgcttgaccaagctcttgtatcaaacgttggagatagtactgaagtttccgttaagatgtttgatgcttatgtcgacaccttttcagcaacttttagtgttcctatggaaaaacttaaggcacttgttgctacagctcacagcgagttagcaaagggtgtagctttagatggtgtcctttctacattcgtgtcagctgcccgacaaggtgttgttgataccgatgttgacacaaaggatgttattgaatgtctcaaactttcacatcactctgacttagaagtgacaggtgacagttgtaacaatttcatgctcacctataataaggttgaaaacatgacgcccagagatcttggcgcatgtattgactgtaatgcaaggcatatcaatgcccaagtagcaaaaagtcacaatgtttcactcatctggaatgtaaaagactacatgtctttatctgaacagctgcgtaaacaaattcgtactgctgccaagaagaacaacataccttttacactaacttgtgctacaactagacaggttgtcaatgtcataactactaaaatctcactcaagggtggtaagattgttagtacttgttttaaacttatgcttaaggccacattattgtgcgttcttgctgcattggtttgttatatcgttatgccagtacatacattgtcaatccatgatggttacacaaatgaaatcattggttacaaagccattcaggatggtgtcactcgtgacatcatttctactgatgattgttttgcaaataaacatgctggttttgacgcatggtttagccagcgtggtggttcatacaaaaatgacaaaagctgccctgtagtagctgctatcattacaagagagattggtttcatagtgcctggcttaccgggtactgtgctgagagcaatcaatggtgacttcttgcattttctacctcgtgtttttagtgctgttggcaacatttgctacacaccttccaaactcattgagtatagtgattttgctacctctgcttgcgttcttgctgctgagtgtacaatttttaaggatgctatgggcaaacctgtgccatattgttatgacactaatttgctagagggttctatttcttatagtgagcttcgtccagacactcgttatgtgcttatggatggttccatcatacagtttcctaacacttacctggagggttctgttagagtagtaacaacttttgatgctgagtactgtagacatggtacatgcgaaaggtcagaagtaggtatttgcctatctaccagtggtagatgggttcttaataatgagcattacagagctctatcaggagttttctgtggtgttgatgcgatgaatctcatagctaacatctttactcctcttgtgcaacctgtgggtgctttagatgtgtctgcttcagtagtggctggtggtattattgccatattggtgacttgtgctgcctactactttatgaaattcagacgtgtttttggtgagtacaaccatgttgttgctgctaatgcacttttgtttttgatgtctttcactatactctgtctggtaccagcttacagctttctgccgggagtctactcagtcttttacttgtacttgacattctatttcaccaatgatgtttcattcttggctcaccttcaatggtttgccatgttttctcctattgtgcctttttggataacagcaatctatgtattctgtatttctctgaagcactgccattggttctttaacaactatcttaggaaaagagtcatgtttaatggagttacatttagtaccttcgaggaggctgctttgtgtacctttttgctcaacaaggaaatgtacctaaaattgcgtagcgagacactgttgccacttacacagtataacaggtatcttgctctatataacaagtacaagtatttcagtggagccttagatactaccagctatcgtgaagcagcttgctgccacttagcaaaggctctaaatgactttagcaactcaggtgctgatgttctctaccaaccaccacagacatcaatcacttctgctgttctgcagagtggttttaggaaaatggcattcccgtcaggcaaagttgaagggtgcatggtacaagtaacctgtggaactacaactcttaatggattgtggttggatgacacagtatactgtccaagacatgtcatttgcacagcagaagacatgcttaatcctaactatgaagatctgctcattcgcaaatccaaccatagctttcttgttcaggctggcaatgttcaacttcgtgttattggccattctatgcaaaattgtctgcttaggcttaaagttgatacttctaaccctaagacacccaagtataaatttgtccgtatccaacctggtcaaacattttcagttctagcatgctacaatggttcaccatctggtgtttatcagtgtgccatgagacctaatcataccattaaaggttctttccttaatggatcatgtggtagtgttggttttaacattgattatgattgcgtgtctttctgctatatgcatcatatggagcttccaacaggagtacacgctggtactgacttagaaggtaaattctatggtccatttgttgacagacaaactgcacaggctgcaggtacagacacaaccataacattaaatgttttggcatggctgtatgctgctgttatcaatggtgataggtggtttcttaatagattcaccactactttgaatgactttaaccttgtggcaatgaagtacaactatgaacctttgacacaagatcatgttgacatattgggacctctttctgctcaaacaggaattgccgtcttagatatgtgtgctgctttgaaagagctgctgcagaatggtatgaatggtcgtactatccttggtagcactattttagaagatgagtttacaccatttgatgttgttagacaatgctctggtgttaccttccaaggtaagttcaagaaaattgttaagggcactcatcattggatgcttttaactttcttgacatcactattgattcttgttcaaagtacacagtggtcactgtttttctttgtttacgagaatgctttcttgccatttactcttggtattatggcaattgctgcatgtgctatgctgcttgttaagcataagcacgcattcttgtgcttgtttctgttaccttctcttgcaacagttgcttactttaatatggtctacatgcctgctagctgggtgatgcgtatcatgacatggcttgaattggctgacactagcttgtctggttataggcttaaggattgtgttatgtatgcttcagctttagttttgcttattctcatgacagctcgcactgtttatgatgatgctgctagacgtgtttggacactgatgaatgtcattacacttgtttacaaagtctactatggtaatgctttagatcaagctatttccatgtgggccttagttatttctgtaacctctaactattctggtgtcgttacgactatcatgtttttagctagagctatagtgtttgtgtgtgttgagtattacccattgttatttattactggcaacaccttacagtgtatcatgcttgtttattgtttcttaggctattgttgctgctgctactttggccttttctgtttactcaaccgttacttcaggcttactcttggtgtttatgactacttggtctctacacaagaatttaggtatatgaactcccaggggcttttgcctcctaagagtagtattgatgctttcaagcttaacattaagttgttgggtattggaggtaaaccatgtatcaaggttgctactgtacagtctaaaatgtctgacgtaaagtgcacatctgtggtactgctctcggttcttcaacaacttagagtagagtcatcttctaaattgtgggcacaatgtgtacaactccacaatgatattcttcttgcaaaagacacaactgaagctttcgagaagatggtttctcttttgtctgttttgctatccatgcagggtgctgtagacattaataggttgtgcgaggaaatgctcgataaccgtgctactcttcaggctattgcttcagaatttagttctttaccatcatatgccgcttatgccactgcccaggaggcctatgagcaggctgtagctaatggtgattctgaagtcgttctcaaaaagttaaagaaatctttgaatgtggctaaatctgagtttgaccgtgatgctgccatgcaacgcaagttggaaaagatggcagatcaggctatgacccaaatgtacaaacaggcaagatctgaggacaagagggcaaaagtaactagtgctatgcaaacaatgctcttcactatgcttaggaagcttgataatgatgcacttaacaacattatcaacaatgcgcgtgatggttgtgttccactcaacatcataccattgactacagcagccaaactcatggttgttgtccctgattatggtacctacaagaacacttgtgatggtaacacctttacatatgcatctgcactctgggaaatccagcaagttgttgatgcggatagcaagattgttcaacttagtgaaattaacatggacaattcaccaaatttggcttggcctcttattgttacagctctaagagccaactcagctgttaaactacagaataatgaactgagtccagtagcactacgacagatgtcctgtgcggctggtaccacacaaacagcttgtactgatgacaatgcacttgcctactataacaattcgaagggaggtaggtttgtgctggcattactatcagaccaccaagatctcaaatgggctagattccctaagagtgatggtacaggtacaatttacacagaactggaaccaccttgtaggtttgttacagacacaccaaaagggcctaaagtgaaatacttgtacttcatcaaaggcttaaacaacctaaatagaggtatggtgctgggcagtttagctgctacagtacgtcttcaggctggaaatgctacagaagtacctgccaattcaactgtgctttccttctgtgcttttgcagtagaccctgctaaagcatataaggattacctagcaagtggaggacaaccaatcaccaactgtgtgaagatgttgtgtacacacactggtacaggacaggcaattactgtaacaccagaagctaacatggaccaagagtcctttggtggtgcttcatgttgtctgtattgtagatgccacattgaccatccaaatcctaaaggattctgtgacttgaaaggtaagtacgtccaaatacctaccacttgtgctaatgacccagtgggttttacacttagaaacacagtctgtaccgtctgcggaatgtggaaaggttatggctgtagttgtgaccaactccgcgaacccttgatgcagtctgcggatgcatcaacgtttttaaacgggtttgcggtgtaagtgcagcccgtcttacaccgtgcggcacaggcactagtactgatgtcgtctacagggcttttgatatttacaacgaaaaaagtgctggttttgcaaagttcctaaaaactaattgctgtcgcttccaggagaaggatgaggaaggcaatttattagactcttactttgtagttaagaggcatactatgtctaactaccaacatgaagagactatttataacttggttaaagattgtccagcggttgctgtccatgactttttcaagtttagagtagatggtgacatggtaccacatatatcacgtcagcgtctaactaaatacacaatggctgatttagtctatgctctacgtcattttgatgagggtaattgtgatacattaaaagaaatactcgtcacatacaattgctgtgatgatgattatttcaataagaaggattggtatgacttcgtagagaatcctgacatcttacgcgtatatgctaacttaggtgagcgtgtacgccaatcattattaaagactgtacaattctgcgatgctatgcgtgatgcaggcattgtaggcgtactgacattagataatcaggatcttaatgggaactggtacgatttcggtgatttcgtacaagtagcaccaggctgcggagttcctattgtggattcatattactcattgctgatgcccatcctcactttgactagggcattggctgctgagtcccatatggatgctgatctcgcaaaaccacttattaagtgggatttgctgaaatatgattttacggaagagagactttgtctcttcgaccgttattttaaatattgggaccagacataccatcccaattgtattaactgtttggatgataggtgtatccttcattgtgcaaactttaatgtgttattttctactgtgtttccacctacaagttttggaccactagtaagaaaaatatttgtagatggtgttccttttgttgtttcaactggataccattttcgtgagttaggagtcgtacataatcaggatgtaaacttacatagctcgcgtctcagtttcaaggaacttttagtgtatgctgctgatccagctatgcatgcagcttctggcaatttattgctagataaacgcactacatgcttttcagtagctgcactaacaaacaatgttgcttttcaaactgtcaaacccggtaattttaataaagacttttatgactttgctgtgtctaaaggtttctttaaggaaggaagttctgttgaactaaaacacttcttctttgctcaggatggcaacgctgctatcagtgattatgactattatcgttataatctgccaacaatgtgtgatatcagacaactcctattcgtagttgaagttgttgataaatactttgattgttacgatggtggctgtattaatgccaaccaagtaatcgttaacaatctggataaatcagctggtttcccatttaataaatggggtaaggctagactttattatgactcaatgagttatgaggatcaagatgcacttttcgcgtatactaagcgtaatgtcatccctactataactcaaatgaatcttaagtatgccattagtgcaaagaatagagctcgcaccgtagctggtgtctctatctgtagtactatgacaaatagacagtttcatcagaaattattgaagtcaatagccgccactagaggagctactgtggtaattggaacaagcaagttttacggtggctggcataatatgttaaaaactgtttacagtgatgtagaaactccacaccttatgggttgggattatccaaaatgtgacagagccatgcctaacatgcttaggataatggcctctcttgttcttgctcgcaaacataacacttgctgtaacttatcacaccgtttctacaggttagctaacgagtgtgcgcaagtattaagtgagatggtcatgtgtggcggctcactatatgttaaaccaggtggaacatcatccggtgatgctacaactgcttatgctaatagtgtctttaacatttgtcaagctgttacagccaatgtaaatgcacttctttcaactgatggtaataagatagctgacaagtatgtccgcaatctacaacacaggctctatgagtgtctctatagaaatagggatgttgatcatgaattcgtggatgagttttacgcttacctgcgtaaacatttctccatgatgattctttctgatgatgccgttgtgtgctataacagtaactatgcggctcaaggtttagtagctagcattaagaactttaaggcagttctttattatcaaaataatgtgttcatgtctgaggcaaaatgttggactgagactgaccttactaaaggacctcacgaattttgctcacagcatacaatgctagttaaacaaggagatgattacgtgtacctgccttacccagatccatcaagaatattaggcgcaggctgttttgtcgatgatattgtcaaaacagatggtacacttatgattgaaaggttcgtgtcactggctattgatgcttacccacttacaaaacatcctaatcaggagtatgctgatgtctttcacttgtatttacaatacattagaaagttacatgatgagcttactggccacatgttggacatgtattccgtaatgctaactaatgataacacctcacggtactgggaacctgagttttatgaggctatgtacacaccacatacagtcttgcaggctgtaggtgcttgtgtattgtgcaattcacagacttcacttcgttgcggtgcctgtattaggagaccattcctatgttgcaagtgctgctatgaccatgtcatttcaacatcacacaaattagtgttgtctgttaatccctatgtttgcaatgccccaggttgtgatgtcactgatgtgacacaactgtatctaggaggtatgagctattattgcaagtcacataagcctcccattagttttccattatgtgctaatggtcaggtttttggtttatacaaaaacacatgtgtaggcagtgacaatgtcactgacttcaatgcgatagcaacatgtgattggactaatgctggcgattacatacttgccaacacttgtactgagagactcaagcttttcgcagcagaaacgctcaaagccactgaggaaacatttaagctgtcatatggtattgccactgtacgcgaagtactctctgacagagaattgcatctttcatgggaggttggaaaacctagaccaccattgaacagaaactatgtctttactggttaccgtgtaactaaaaatagtaaagtacagattggagagtacacctttgaaaaaggtgactatggtgatgctgttgtgtacagaggtactacgacatacaagttgaatgttggtgattactttgtgttgacatctcacactgtaatgccacttagtgcacctactctagtgccacaagagcactatgtgagaattactggcttgtacccaacactcaacatctcagatgagttttctagcaatgttgcaaattatcaaaaggtcggcatgcaaaagtactctacactccaaggaccacctggtactggtaagagtcattttgccatcggacttgctctctattacccatctgctcgcatagtgtatacggcatgctctcatgcagctgttgatgccctatgtgaaaaggcattaaaatatttgcccatagataaatgtagtagaatcatacctgcgcgtgcgcgcgtagagtgttttgataaattcaaagtgaattcaacactagaacagtatgttttctgcactgtaaatgcattgccagaaacaactgctgacattgtagtctttgatgaaatctctatggctactaattatgacttgagtgttgtcaatgctagacttcgtgcaaaacactacgtctatattggcgatcctgctcaattaccagccccccgcacattgctgactaaaggcacactagaaccagaatattttaattcagtgtgcagacttatgaaaacaataggtccagacatgttccttggaacttgtcgccgttgtcctgctgaaattgttgacactgtgagtgctttagtttatgacaataagctaaaagcacacaaggataagtcagctcaatgcttcaaaatgttctacaaaggtgttattacacatgatgtttcatctgcaatcaacagacctcaaataggcgttgtaagagaatttcttacacgcaatcctgcttggagaaaagctgtttttatctcaccttataattcacagaacgctgtagcttcaaaaatcttaggattgcctacgcagactgttgattcatcacagggttctgaatatgactatgtcatattcacacaaactactgaaacagcacactcttgtaatgtcaaccgcttcaatgtggctatcacaagggcaaaaattggcattttgtgcataatgtctgatagagatctttatgacaaactgcaatttacaagtctagaaataccacgtcgcaatgtggctacattacaagcagaaaatgtaactggactttttaaggactgtagtaagatcattactggtcttcatcctacacaggcacctacacacctcagcgttgatataaaattcaagactgaaggattatgtgttgacataccaggcataccaaaggacatgacctaccgtagactcatctctatgatgggtttcaaaatgaattaccaagtcaatggttaccctaatatgtttatcacccgcgaagaagctattcgtcacgttcgtgcgtggattggctttgatgtagagggctgtcatgcaactagagatgctgtgggtactaacctacctctccagctaggattttctacaggtgttaacttagtagctgtaccgactggttatgttgacactgaaaataacacagaattcaccagagttaatgcaaaacctccaccaggtgaccagtttaaacatcttataccactcatgtataaaggcttgccctggaatgtagtgcgtattaagatagtacaaatgctcagtgatacactgaaaggattgtcagacagagtcgtgttcgtcctttgggcgcatggctttgagcttacatcaatgaagtactttgtcaagattggacctgaaagaacgtgttgtctgtgtgacaaacgtgcaacttgcttttctacttcatcagatacttatgcctgctggaatcattctgtgggttttgactatgtctataacccatttatgattgatgttcagcagtggggctttacgggtaaccttcagagtaaccatgaccaacattgccaggtacatggaaatgcacatgtggctagttgtgatgctatcatgactagatgtttagcagtccatgagtgctttgttaagcgcgttgattggtctgttgaataccctattataggagatgaactgagggttaattctgcttgcagaaaagtacaacacatggttgtgaagtctgcattgcttgctgataagtttccagttcttcatgacattggaaatccaaaggctatcaagtgtgtgcctcaggctgaagtagaatggaagttctacgatgctcagccatgtagtgacaaagcttacaaaatagaggaactcttctattcttatgctacacatcacgataaattcactgatggtgtttgtttgttttggaattgtaacgttgatcgttacccagccaatgcaattgtgtgtaggtttgacacaagagtcttgtcaaacttgaacttaccaggctgtgatggtggtagtttgtatgtgaataagcatgcattccacactccagctttcgataaaagtgcatttactaatttaaagcaattgcctttcttttactattctgatagtccttgtgagtctcatggcaaacaagtagtgtcggatattgattatgttccactcaaatctgctacgtgtattacacgatgcaatttaggtggtgctgtttgcagacaccatgcaaatgagtaccgacagtacttggatgcatataatatgatgatttctgctggatttagcctatggatttacaaacaatttgatacttataacctgtggaatacatttaccaggttacagagtttagaaaatgtggcttataatgttgttaataaaggacactttgatggacacgccggcgaagcacctgtttccatcattaataatgctgtttacacaaaggtagatggtattgatgtggagatctttgaaaataagacaacacttcctgttaatgttgcatttgagctttgggctaagcgtaacattaaaccagtgccagagattaagatactcaataatttgggtgttgatatcgctgctaatactgtaatctgggactacaaaagagaagccccagcacatgtatctacaataggtgtctgcacaatgactgacattgccaagaaacctactgagagtgcttgttcttcacttactgtcttgtttgatggtagagtggaaggacaggtagacctttttagaaacgcccgtaatggtgttttaataacagaaggttcagtcaaaggtctaacaccttcaaagggaccagcacaagctagcgtcaatggagtcacattaattggagaatcagtaaaaacacagtttaactactttaagaaagtagacggcattattcaacagttgcctgaaacctactttactcagagcagagacttagaggattttaagcccagatcacaaatggaaactgactttctcgagctcgctatggatgaattcatacagcgatataagctcgagggctatgccttcgaacacatcgtttatggagatttcagtcatggacaacttggcggtcttcatttaatgataggcttagccaagcgctcacaagattcaccacttaaattagaggattttatccctatggacagcacagtgaaaaattacttcataacagatgcgcaaacaggttcatcaaaatgtgtgtgttctgtgattgatcttttacttgatgactttgtcgagataataaagtcacaagatttgtcagtgatttcaaaagtggtcaaggttacaattgactatgctgaaatttcattcatgctttggtgtaaggatggacatgttgaaaccttctacccaaaactacaagcaagtcaagcgtggcaaccaggtgttgcgatgcctaacttgtacaagatgcaaagaatgcttcttgaaaagtgtgaccttcagaattatggtgaaaatgctgttataccaaaaggaataatgatgaatgtcgcaaagtatactcaactgtgtcaatacttaaatacacttactttagctgtaccctacaacatgagagttattcactttggtgctggctctgataaaggagttgcaccaggtacagctgtgctcagacaatggttgccaactggcacactacttgtcgattcagatcttaatgacttcgtctccgacgcagattctactttaattggagactgtgcaacagtacatacggctaataaatgggaccttattattagcgatatgtatgaccctaggaccaaacatgtgacaaaagagaatgactctaaagaagggtttttcacttatctgtgtggatttataaagcaaaaactagccctgggtggttctatagctgtaaagataacagagcattcttggaatgctgacctttacaagcttatgggccatttctcatggtggacagcttttgttacaaatgtaaatgcatcatcatcggaagcatttttaattggggctaactatcttggcaagccgaaggaacaaattgatggctataccatgcatgctaactacattttctggaggaacacaaatcctatccagttgtcttcctattcactctttgacatgagcaaatttcctcttaaattaagaggaactgctgtaatgtctcttaaggagaatcaaatcaatgatatgatttattctcttctggaaaaaggtaggcttatcattagagaaaacaacagagttgtggtttcaagtgatattcttgttaacaactaaacgaacatgtttattttcttattatttcttactctcactagtggtagtgaccttgaccggtgcaccacttttgatgatgttcaagctcctaattacactcaacatacttcatctatgaggggggtttactatcctgatgaaatttttagatcagacactctttatttaactcaggatttatttcttccattttattctaatgttacagggtttcatactattaatcatacgtttggcaaccctgtcataccttttaaggatggtatttattttgctgccacagagaaatcaaatgttgtccgtggttgggtttttggttctaccatgaacaacaagtcacagtcggtgattattattaacaattctactaatgttgttatacgagcatgtaactttgaattgtgtgacaaccctttctttgctgtttctaaacccatgggtacacagacacatactatgatattcgataatgcatttaattgcactttcgagtacatatctgatgccttttcgcttgatgtttcagaaaagtcaggtaattttaaacacttacgagagtttgtgtttaaaaataaagatgggtttctctatgtttataagggctatcaacctatagatgtagttcgtgatctaccttctggttttaacactttgaaacctatttttaagttgcctcttggtattaacattacaaattttagagccattcttacagccttttcacctgctcaagacatttggggcacgtcagctgcagcctattttgttggctatttaaagccaactacatttatgctcaagtatgatgaaaatggtacaatcacagatgctgttgattgttctcaaaatccacttgctgaactcaaatgctctgttaagagctttgagattgacaaaggaatttaccagacctctaatttcagggttgttccctcaggagatgttgtgagattccctaatattacaaacttgtgtccttttggagaggtttttaatgctactaaattcccttctgtctatgcatgggagagaaaaaaaatttctaattgtgttgctgattactctgtgctctacaactcaacatttttttcaacctttaagtgctatggcgtttctgccactaagttgaatgatctttgcttctccaatgtctatgcagattcttttgtagtcaagggagatgatgtaagacaaatagcgccaggacaaactggtgttattgctgattataattataaattgccagatgatttcatgggttgtgtccttgcttggaatactaggaacattgatgctacttcaactggtaattataattataaatataggtatcttagacatggcaagcttaggccctttgagagagacatatctaatgtgcctttctcccctgatggcaaaccttgcaccccacctgctcttaattgttattggccattaaatgattatggtttttacaccactactggcattggctaccaaccttacagagttgtagtactttcttttgaacttttaaatgcaccggccacggtttgtggaccaaaattatccactgaccttattaagaaccagtgtgtcaattttaattttaatggactcactggtactggtgtgttaactccttcttcaaagagatttcaaccatttcaacaatttggccgtgatgtttctgatttcactgattccgttcgagatcctaaaacatctgaaatattagacatttcaccttgctcttttgggggtgtaagtgtaattacacctggaacaaatgcttcatctgaagttgctgttctatatcaagatgttaactgcactgatgtttctacagcaattcatgcagatcaactcacaccagcttggcgcatatattctactggaaacaatgtattccagactcaagcaggctgtcttataggagctgagcatgtcgacacttcttatgagtgcgacattcctattggagctggcatttgtgctagttaccatacagtttctttattacgtagtactagccaaaaatctattgtggcttatactatgtctttaggtgctgatagttcaattgcttactctaataacaccattgctatacctactaacttttcaattagcattactacagaagtaatgcctgtttctatggctaaaacctccgtagattgtaatatgtacatctgcggagattctactgaatgtgctaatttgcttctccaatatggtagcttttgcacacaactaaatcgtgcactctcaggtattgctgctgaacaggatcgcaacacacgtgaagtgttcgctcaagtcaaacaaatgtacaaaaccccaactttgaaatattttggtggttttaatttttcacaaatattacctgaccctctaaagccaactaagaggtcttttattgaggacttgctctttaataaggtgacactcgctgatgctggcttcatgaagcaatatggcgaatgcctaggtgatattaatgctagagatctcatttgtgcgcagaagttcaatggacttacagtgttgccacctctgctcactgatgatatgattgctgcctacactgctgctctagttagtggtactgccactgctggatggacatttggtgctggcgctgctcttcaaataccttttgctatgcaaatggcatataggttcaatggcattggagttacccaaaatgttctctatgagaaccaaaaacaaatcgccaaccaatttaacaaggcgattagtcaaattcaagaatcacttacaacaacatcaactgcattgggcaagctgcaagacgttgttaaccagaatgctcaagcattaaacacacttgttaaacaacttagctctaattttggtgcaatttcaagtgtgctaaatgatatcctttcgcgacttgataaagtcgaggcggaggtacaaattgacaggttaattacaggcagacttcaaagccttcaaacctatgtaacacaacaactaatcagggctgctgaaatcagggcttctgctaatcttgctgctactaaaatgtctgagtgtgttcttggacaatcaaaaagagttgacttttgtggaaagggctaccaccttatgtccttcccacaagcagccccgcatggtgttgtcttcctacatgtcacgtatgtgccatcccaggagaggaacttcaccacagcgccagcaatttgtcatgaaggcaaagcatacttccctcgtgaaggtgtttttgtgtttaatggcacttcttggtttattacacagaggaacttcttttctccacaaataattactacagacaatacatttgtctcaggaaattgtgatgtcgttattggcatcattaacaacacagtttatgatcctctgcaacctgagcttgactcattcaaagaagagctggacaagtacttcaaaaatcatacatcaccagatgttgatcttggcgacatttcaggcattaacgcttctgtcgtcaacattcaaaaagaaattgaccgcctcaatgaggtcgctaaaaatttaaatgaatcactcattgaccttcaagaattgggaaaatatgagcaatatattaaatggccttggtatgtttggctcggcttcattgctggactaattgccatcgtcatggttacaatcttgctttgttgcatgactagttgttgcagttgcctcaagggtgcatgctcttgtggttcttgctgcaagtttgatgaggatgactctgagccagttctcaagggtgtcaaattacattacacataaacgaacttatggatttgtttatgagattttttactcttggatcaattactgcacagccagtaaaaattgacaatgcttctcctgcaagtactgttcatgctacagcaacgataccgctacaagcctcactccctttcggatggcttgttattggcgttgcatttcttgctgtttttcagagcgctaccaaaataattgcgctcaataaaagatggcagctagccctttataagggcttccagttcatttgcaatttactgctgctatttgttaccatctattcacatcttttgcttgtcgctgcaggtaaggaggcgcaatttttgtacctctatgccttgatatattttctacaatgcatcaacgcatgtagaattattatgagatgttggctttgttggaagtgcaaatccaagaacccattactttatgatgccaactactttgtttgctggcacacacataactatgactactgtataccatataacagtgtcacagatacaattgtcgttactgaaggtgacggcatttcaacaccaaaactcaaagaagactaccaaattggtggttattctgaggataggcactcaggtgttaaagactatgtcgttgtacatggctatttcaccgaagtttactaccagcttgagtctacacaaattactacagacactggtattgaaaatgctacattcttcatctttaacaagcttgttaaagacccaccgaatgtgcaaatacacacaatcgacggctcttcaggagttgctaatccagcaatggatccaatttatgatgagccgacgacgactactagcgtgcctttgtaagcacaagaaagtgagtacgaacttatgtactcattcgtttcggaagaaacaggtacgttaatagttaatagcgtacttctttttcttgctttcgtggtattcttgctagtcacactagccatccttactgcgcttcgattgtgtgcgtactgctgcaatattgttaacgtgagtttagtaaaaccaacggtttacgtctactcgcgtgttaaaaatctgaactcttctgaaggagttcctgatcttctggtctaaacgaactaactattattattattctgtttggaactttaacattgcttatcatggcagacaacggtactattaccgttgaggagcttaaacaactcctggaacaatggaacctagtaataggtttcctattcctagcctggattatgttactacaatttgcctattctaatcggaacaggtttttgtacataataaagcttgttttcctctggctcttgtggccagtaacacttgcttgttttgtgcttgctgttgtctacagaattaattgggtgactggcgggattgcgattgcaatggcttgtattgtaggcttgatgtggcttagctacttcgttgcttccttcaggctgtttgctcgtacccgctcaatgtggtcattcaacccagaaacaaacattcttctcaatgtgcctctccgggggacaattgtgaccagaccgctcatggaaagtgaacttgtcattggtgctgtgatcattcgtggtcacttgcgaatggccggacactccctagggcgctgtgacattaaggacctgccaaaagagatcactgtggctacatcacgaacgctttcttattacaaattaggagcgtcgcagcgtgtaggcactgattcaggttttgctgcatacaaccgctaccgtattggaaactataaattaaatacagaccacgccggtagcaacgacaatattgctttgctagtacagtaagtgacaacagatgtttcatcttgttgacttccaggttacaatagcagagatattgattatcattatgaggactttcaggattgctatttggaatcttgacgttataataagttcaatagtgagacaattatttaagcctctaactaagaagaattattcggagttagatgatgaagaacctatggagttagattatccataaaacgaacatgaaaattattctcttcctgacattgattgtatttacatcttgcgagctatatcactatcaggagtgtgttagaggtacgactgtactactaaaagaaccttgcccatcaggaacatacgagggcaattcaccatttcaccctcttgctgacaataaatttgcactaacttgcactagcacacactttgcttttgcttgtgctgacggtactcgacatacctatcagctgcgtgcaagatcagtttcaccaaaacttttcatcagacaagaggaggttcaacaagagctctactcgccactttttctcattgttgctgctctagtatttttaatactttgcttcaccattaagagaaagacagaatgaatgagctcactttaattgacttctatttgtgctttttagcctttctgctattccttgttttaataatgcttattatattttggttttcactcgaaatccaggatctagaagaaccttgtaccaaagtctaaacgaacatgaaacttctcattgttttgacttgtatttctctatgcagttgcatatgcactgtagtacagcgctgtgcatctaataaacctcatgtgcttgaagatccttgtaaggtacaacactaggggtaatacttatagcactgcttggctttgtgctctaggaaaggttttaccttttcatagatggcacactatggttcaaacatgcacacctaatgttactatcaactgtcaagatccagctggtggtgcgcttatagctaggtgttggtaccttcatgaaggtcaccaaactgctgcatttagagacgtacttgttgttttaaataaacgaacaaattaaaatgtctgataatggaccccaatcaaaccaacgtagtgccccccgcattacatttggtggacccacagattcaactgacaataaccagaatggaggacgcaatggggcaaggccaaaacagcgccgaccccaaggtttacccaataatactgcgtcttggttcacagctctcactcagcatggcaaggaggaacttagattccctcgaggccagggcgttccaatcaacaccaatagtggtccagatgaccaaattggctactaccgaagagctacccgacgagttcgtggtggtgacggcaaaatgaaagagctcagccccagatggtacttctattacctaggaactggcccagaagcttcacttccctacggcgctaacaaagaaggcatcgtatgggttgcaactgagggagccttgaatacacccaaagaccacattggcacccgcaatcctaataacaatgctgccaccgtgctacaacttcctcaaggaacaacattgccaaaaggcttctacgcagagggaagcagaggcggcagtcaagcctcttctcgctcctcatcacgtagtcgcggtaattcaagaaattcaactcctggcagcagtaggggaaattctcctgctcgaatggctagcggaggtggtgaaactgccctcgcgctattgctgctagacagattgaaccagcttgagagcaaagtttctggtaaaggccaacaacaacaaggccaaactgtcactaagaaatctgctgctgaggcatctaaaaagcctcgccaaaaacgtactgccacaaaacagtacaacgtcactcaagcatttgggagacgtggtccagaacaaacccaaggaaatttcggggaccaagacctaatcagacaaggaactgattacaaacattggccgcaaattgcacaatttgctccaagtgcctctgcattctttggaatgtcacgcattggcatggaagtcacaccttcgggaacatggctgacttatcatggagccattaaattggatgacaaagatccacaattcaaagacaacgtcatactgctgaacaagcacattgacgcatacaaaacattcccaccaacagagcctaaaaaggacaaaaagaaaaagactgatgaagctcagcctttgccgcagagacaaaagaagcagcccactgtgactcttcttcctgcggctgacatggatgatttctccagacaacttcaaaattccatgagtggagcttctgctgattcaactcaggcataaacactcatgatgaccacacaaggcagatgggctatgtaaacgttttcgcaattccgtttacgatacatagtctactcttgtgcagaatgaattctcgtaactaaacagcacaagtaggtttagttaactttaatctcacatagcaatctttaatcaatgtgtaacattagggaggacttgaaagagccaccacattttcatcgaggccacgcggagtacgatcgagggtacagtgaataatgctagggagagctgcctatatggaagagccctaatgtgtaaaattaattttagtagtgctatccccatgtgattttaatagcttcttaggagaatgacaaaaaaaaaaaaaaa

SEQ ID NO: 62 - DNA, 29751 bp, Coronavirus
atattaggtttttacctacccaggaaaagccaaccaacctcgatctcttgtagatctgttctctaaacgaactttaaaatctgtgtagctgtcgctcggctgcatgcctagtgcacctacgcagtataaacaataataaattttactgtcgttgacaagaaacgagtaactcgtccctcttctgcagactgcttacggtttcgtccgtgttgcagtcgatcatcagcatacctaggtttcgtccgggtgtgaccgaaaggtaagatggagagccttgttcttggtgtcaacgagaaaacacacgtccaactcagtttgcctgtccttcaggttagagacgtgctagtgcgtggcttcggggactctgtggaagaggccctatcggaggcacgtgaacacctcaaaaatggcacttgtggtctagtagagctggaaaaaggcgtactgccccagcttgaacagccctatgtgttcattaaacgttctgatgccttaagcaccaatcacggccacaaggtcgttgagctggttgcagaaatggacggcattcagtacggtcgtagcggtataacactgggagtactcgtgccacatgtgggcgaaaccccaattgcataccgcaatgttcttcttcgtaagaacggtaataagggagccggtggtcatagctatggcatcgatctaaagtcttatgacttaggtgacgagcttggcactgatcccattgaagattatgaacaaaactggaacactaagcatggcagtggtgcactccgtgaactcactcgtgagctcaatggaggtgcagtcactcgctatgtcgacaacaatttctgtggcccagatgggtaccctcttgattgcatcaaagattttctcgcacgcgcgggcaagtcaatgtgcactctttccgaacaacttgattacatcgagtcgaagagaggtgtctactgctgccgtgaccatgagcatgaaattgcctggttcactgagcgctctgataagagctacgagcaccagacacccttcgaaattaagagtgccaagaaatttgacactttcaaaggggaatgcccaaagtttgtgtttcctcttaactcaaaagtcaaagtcattcaaccacgtgttgaaaagaaaaagactgagggtttcatggggcgtatacgctctgtgtaccctgttgcatctccacaggagtgtaacaatatgcacttgtctaccttgatgaaatgtaatcattgcgatgaagtttcatggcagacgtgcgactttctgaaagccacttgtgaacattgtggcactgaaaatttagttattgaaggacctactacatgtgggtacctacctactaatgctgtagtgaaaatgccatgtcctgcctgtcaagacccagagattggacctgagcatagtgttgcagattatcacaaccactcaaacattgaaactcgactccgcaagggaggtaggactagatgttttggaggctgtgtgtttgcctatgttggctgctataataagcgtgcctactgggttcctcgtgctagtgctgatattggctcaggccatactggcattactggtgacaatgtggagaccttgaatgaggatctccttgagatactgagtcgtgaacgtgttaacattaacattgttggcgattttcatttgaatgaagaggttgccatcattttggcatctttctctgcttctacaagtgcctttattgacactataaagagtcttgattacaagtctttcaaaaccattgttgagtcctgcggtaactataaagttaccaagggaaagcccgtaaaaggtgcttggaacattggacaacagagatcagttttaacaccactgtgtggttttccctcacaggctgctggtgttatcagatcaatttttgcgcgcacacttgatgcagcaaaccactcaattcctgatttgcaaagagcagctgtcaccatacttgatggtatttctgaacagtcattacgtcttgtcgacgccatggtttatacttcagacctgctcaccaacagtgtcattattatggcatatgtaactggtggtcttgtacaacagacttctcagtggttgtctaatcttttgggcactactgttgaaaaactcaggcctatctttgaatggattgaggcgaaacttagtgcaggagttgaatttctcaaggatgcttgggagattctcaaatttctcattacaggtgtttttgacatcgtcaagggtcaaatacaggttgcttcagataacatcaaggattgtgtaaaatgcttcattgatgttgttaacaaggcactcgaaatgtgcattgatcaagtcactatcgctggcgcaaagttgcgatcactcaacttaggtgaagtcttcatcgctcaaagcaagggactttaccgtcagtgtatacgtggcaaggagcagctgcaactactcatgcctcttaaggcaccaaaagaagtaacctttcttgaaggtgattcacatgacacagtacttacctctgaggaggttgttctcaagaacggtgaactcgaagcactcgagacgcccgttgatagcttcacaaatggagctatcgttggcacaccagtctgtgtaaatggcctcatgctcttagagattaaggacaaagaacaatactgcgcattgtctcctggtttactggctacaaacaatgtctttcgcttaaaagggggtgcaccaattaaaggtgtaacctttggagaagatactgtttgggaagttcaaggttacaagaatgtgagaatcacatttgagcttgatgaacgtgttgacaaagtgcttaatgaaaagtgctctgtctacactgttgaatccggtaccgaagttactgagtttgcatgtgttgtagcagaggctgttgtgaagactttacaaccagtttctgatctccttaccaacatgggtattgatcttgatgagtggagtgtagctacattctacttatttgatgatgctggtgaagaaaacttttcatcacgtatgtattgttccttttaccctccagatgaggaagaagaggacgatgcagagtgtgaggaagaagaaattgatgaaacctgtgaacatgagtacggtacagaggatgattatcaaggtctccctctggaatttggtgcctcagctgaaacagttcgagttgaggaagaagaagaggaagactggctggatgatactactgagcaatcagagattgagccagaaccagaacctacacctgaagaaccagttaatcagtttactggttatttaaaacttactgacaatgttgccattaaatgtgttgacatcgttaaggaggcacaaagtgctaatcctatggtgattgtaaatgctgctaacatacacctgaaacatggtggtggtgtagcaggtgcactcaacaaggcaaccaatggtgccatgcaaaaggagagtgatgattacattaagctaaatggccctcttacagtaggagggtcttgtttgctttctggacataatcttgctaagaagtgtctgcatgttgttggacctaacctaaatgcaggtgaggacatccagcttcttaaggcagcatatgaaaatttcaattcacaggacatcttacttgcaccattgttgtcagcaggcatatttggtgctaaaccacttcagtctttacaagtgtgcgtgcagacggttcgtacacaggtttatattgcagtcaatgacaaagctctttatgagcaggttgtcatggattatcttgataacctgaagcctagagtggaagcacctaaacaagaggagccaccaaacacagaagattccaaaactgaggagaaatctgtcgtacagaagcctgtcgatgtgaagccaaaaattaaggcctgcattgatgaggttaccacaacactggaagaaactaagtttcttaccaataagttactcttgtttgctgatatcaatggtaagctttaccatgattctcagaacatgcttagaggtgaagatatgtctttccttgagaaggatgcaccttacatggtaggtgatgttatcactagtggtgatatcacttgtgttgtaataccctccaaaaaggctggtggcactactgagatgctctcaagagctttgaagaaagtgccagttgatgagtatataaccacgtaccctggacaaggatgtgctggttatacacttgaggaagctaagactgctcttaagaaatgcaaatctgcattttatgtactaccttcagaagcacctaatgctaaggaagagattctaggaactgtatcctggaatttgagagaaatgcttgctcatgctgaagagacaagaaaattaatgcctatatgcatggatgttagagccataatggcaaccatccaacgtaagtataaaggaattaaaattcaagagggcatcgttgactatggtgtccgattcttcttttatactagtaaagagcctgtagcttctattattacgaagctgaactctctaaatgagccgcttgtcacaatgccaattggttatgtgacacatggttttaatcttgaagaggctgcgcgctgtatgcgttctcttaaagctcctgccgtagtgtcagtatcatcaccagatgctgttactacatataatggatacctcacttcgtcatcaaagacatctgaggagcactttgtagaaacagtttctttggctggctcttacagagattggtcctattcaggacagcgtacagagttaggtgttgaatttcttaagcgtggtgacaaaattgtgtaccacactctggagagccccgtcgagtttcatcttgacggtgaggttctttcacttgacaaactaaagagtctcttatccctgcgggaggttaagactataaaagtgttcacaactgtggacaacactaatctccacacacagcttgtggatatgtctatgacatatggacagcagtttggtccaacatacttggatggtgctgatgttacaaaaattaaacctcatgtaaatcatgagggtaagactttctttgtactacctagtgatgacacactacgtagtgaagctttcgagtactaccatactcttgatgagagttttcttggtaggtacatgtctgctttaaaccacacaaagaaatggaaatttcctcaagttggtggtttaacttcaattaaatgggctgataacaattgttatttgtctagtgttttattagcacttcaacagcttgaagtcaaattcaatgcaccagcacttcaagaggcttattatagagcccgtgctggtgatgctgctaacttttgtgcactcatactcgcttacagtaataaaactgttggcgagcttggtgatgtcagagaaactatgacccatcttctacagcatgctaatttggaatctgcaaagcgagttcttaatgtggtgtgtaaacattgtggtcagaaaactactaccttaacgggtgtagaagctgtgatgtatatgggtactctatcttatgataatcttaagacaggtgtttccattccatgtgtgtgtggtcgtgatgctacacaatatctagtacaacaagagtcttcttttgttatgatgtctgcaccacctgctgagtataaattacagcaaggtacattcttatgtgcgaatgagtacactggtaactatcagtgtggtcattacactcatataactgctaaggagaccctctatcgtattgacggagctcaccttacaaagatgtcagagtacaaaggaccagtgactgatgttttctacaaggaaacatcttacactacaaccatcaagcctgtgtcgtataaactcgatggagttacttacacagagattgaaccaaaattggatgggtattataaaaaggataatgcttactatacagagcagcctatagaccttgtaccaactcaaccattaccaaatgcgagttttgataatttcaaactcacatgttctaacacaaaatttgctgatgatttaaatcaaatgacaggcttcacaaagccagcttcacgagagctatctgtcacattcttcccagacttgaatggcgatgtagtggctattgactatagacactattcagcgagtttcaagaaaggtgctaaattactgcataagccaattgtttggcacattaaccaggctacaaccaagacaacgttcaaaccaaacacttggtgtttacgttgtctttggagtacaaagccagtagatacttcaaattcatttgaagttctggcagtagaagacacacaaggaatggacaatcttgcttgtgaaagtcaacaacccacctctgaagaagtagtggaaaatcctaccatacagaaggaagtcatagagtgtgacgtgaaaactaccgaagttgtaggcaatgtcatacttaaaccatcagatgaaggtgttaaagtaacacaagagttaggtcatgaggatcttatggctgcttatgtggaaaacacaagcattaccattaagaaacctaatgagctttcactagccttaggtttaaaaacaattgccactcatggtattgctgcaattaatagtgttccttggagtaaaattttggcttatgtcaaaccattcttaggacaagcagcaattacaacatcaaattgcgctaagagattagcacaacgtgtgtttaacaattatatgccttatgtgtttacattattgttccaattgtgtacttttactaaaagtaccaattctagaattagagcttcactacctacaactattgctaaaaatagtgttaagagtgttgctaaattatgtttggatgccggcattaattatgtgaagtcacccaaattttctaaattgttcacaatcgctatgtggctattgttgttaagtatttgcttaggttctctaatctgtgtaactgctgcttttggtgtactcttatctaattttggtgctccttcttattgtaatggcgttagagaattgtatcttaattcgtctaacgttactactatggatttctgtgaaggttcttttccttgcagcatttgtttaagtggattagactcccttgattcttatccagctcttgaaaccattcaggtgacgatttcatcgtacaagctagacttgacaattttaggtctggccgctgagtgggttttggcatatatgttgttcacaaaattcttttatttattaggtctttcagctataatgcaggtgttctttggctattttgctagtcatttcatcagcaattcttggctcatgtggtttatcattagtattgtacaaatggcacccgtttctgcaatggttaggatgtacatcttctttgcttctttctactacatatggaagagctatgttcatatcatggatggttgcacctcttcgacttgcatgatgtgctataagcgcaatcgtgccacacgcgttgagtgtacaactattgttaatggcatgaagagatctttctatgtctatgcaaatggaggccgtggcttctgcaagactcacaattggaattgtctcaattgtgacacattttgcactggtagtacattcattagtgatgaagttgctcgtgatttgtcactccagtttaaaagaccaatcaaccctactgaccagtcatcgtatattgttgatagtgttgctgtgaaaaatggcgcgcttcacctctactttgacaaggctggtcaaaagacctatgagagacatccgctctcccattttgtcaatttagacaatttgagagctaacaacactaaaggttcactgcctattaatgtcatagtttttgatggcaagtccaaatgcgacgagtctgcttctaagtctgcttctgtgtactacagtcagctgatgtgccaacctattctgttgcttgaccaagctcttgtatcagacgttggagatagtactgaagtttccgttaagatgtttgatgcttatgtcgacaccttttcagcaacttttagtgttcctatggaaaaacttaaggcacttgttgctacagctcacagcgagttagcaaagggtgtagctttagatggtgtcctttctacattcgtgtcagctgcccgacaaggtgttgttgataccgatgttgacacaaaggatgttattgaatgtctcaaactttcacatcactctgacttagaagtgacaggtgacagttgtaacaatttcatgctcacctataataaggttgaaaacatgacgcccagagatcttggcgcatgtattgactgtaatgcaaggcatatcaatgcccaagtagcaaaaagtcacaatgtttcactcatctggaatgtaaaagactacatgtctttatctgaacagctgcgtaaacaaattcgtagtgctgccaagaagaacaacataccttttagactaacttgtgctacaactagacaggttgtcaatgtcataactactaaaatctcactcaagggtggtaagattgttagtacttgttttaaacttatgcttaaggccacattattgtgcgttcttgctgcattggtttgttatatcgttatgccagtacatacattgtcaatccatgatggttacacaaatgaaatcattggttacaaagccattcaggatggtgtcactcgtgacatcatttctactgatgattgttttgcaaataaacatgctggttttgacgcatggtttagccagcgtggtggttcatacaaaaatgacaaaagctgccctgtagtagctgctatcattacaagagagattggtttcatagtgcctggcttaccgggtactgtgctgagagcaatcaatggtgacttcttgcattttctacctcgtgtttttagtgctgttggcaacatttgctacacaccttccaaactcattgagtatagtgattttgctacctctgcttgcgttcttgctgctgagtgtacaatttttaaggatgctatgggcaaacctgtgccatattgttatgacactaatttgctagagggttctatttcttatagtgagcttcgtccagacactcgttatgtgcttatggatggttccatcatacagtttcctaacacttacctggagggttctgttagagtagtaacaacttttgatgctgagtactgtagacatggtacatgcgaaaggtcagaagtaggtatttgcctatctaccagtggtagatgggttcttaataatgagcattacagagctctatcaggagttttctgtggtgttgatgcgatgaatctcatagctaacatctttactcctcttgtgcaacctgtgggtgctttagatgtgtctgcttcagtagtggctggtggtattattgccatattggtgacttgtgctgcctactactttatgaaattcagacgtgtttttggtgagtacaaccatgttgttgctgctaatgcacttttgtttttgatgtctttcactatactctgtctggtaccagcttacagctttctgccgggagtctactcagtcttttacttgtacttgacattctatttcaccaatgatgtttcattcttggctcaccttcaatggtttgccatgttttctcctattgtgcctttttggataacagcaatctatgtattctgtatttctctgaagcactgccattggttctttaacaactatcttaggaaaagagtcatgtttaatggagttacatttagtaccttcgaggaggctgctttgtgtacctttttgctcaacaaggaaatgtacctaaaattgcgtagcgagacactgttgccacttacacagtataacaggtatcttgctctatataacaagtacaagtatttcagtggagccttagatactaccagctatcgtgaagcagcttgctgccacttagcaaaggctctaaatgactttagcaactcaggtgctgatgttctctaccaaccaccacagacatcaatcacttctgctgttctgcagagtggttttaggaaaatggcattcccgtcaggcaaagttgaagggtgcatggtacaagtaacctgtggaactacaactcttaatggattgtggttggatgacacagtatactgtccaagacatgtcatttgcacagcagaagacatgcttaatcctaactatgaagatctgctcattcgcaaatccaaccatagctttcttgttcaggctggcaatgttcaacttcgtgttattggccattctatgcaaaattgtctgcttaggcttaaagttgatacttctaaccctaagacacccaagtataaatttgtccgtatccaacctggtcaaacattttcagttctagcatgctacaatggttcaccatctggtgtttatcagtgtgccatgagacctaatcataccattaaaggttctttccttaatggatcatgtggtagtgttggttttaacattgattatgattgcgtgtctttctgctatatgcatcatatggagcttccaacaggagtacacgctggtactgacttagaaggtaaattctatggtccatttgttgacagacaaactgcacaggctgcaggtacagacacaaccataacattaaatgttttggcatggctgtatgctgctgttatcaatggtgataggtggtttcttaatagattcaccactactttgaatgactttaaccttgtggcaatgaagtacaactatgaacctttgacacaagatcatgttgacatattgggacctctttctgctcaaacaggaattgccgtcttagatatgtgtgctgctttgaaagagctgctgcagaatggtatgaatggtcgtactatccttggtagcactattttagaagatgagtttacaccatttgatgttgttagacaatgctctggtgttaccttccaaggtaagttcaagaaaattgttaagggcactcatcattggatgcttttaactttcttgacatcactattgattcttgttcaaagtacacagtggtcactgtttttctttgtttacgagaatgctttcttgccatttactcttggtattatggcaattgctgcatgtgctatgctgcttgttaagcataagcacgcattcttgtgcttgtttctgttaccttctcttgcaacagttgcttactttaatatggtctacatgcctgctagctgggtgatgcgtatcatgacatggcttgaattggctgacactagcttgtctggttataggcttaaggattgtgttatgtatgcttcagctttagttttgcttattctcatgacagctcgcactgtttatgatgatgctgctagacgtgtttggacactgatgaatgtcattacacttgtttacaaagtctactatggtaatgctttagatcaagctatttccatgtgggccttagttatttctgtaacctctaactattctggtgtcgttacgactatcatgtttttagctagagctatagtgtttgtgtgtgttgagtattacccattgttatttattactggcaacaccttacagtgtatcatgcttgtttattgtttcttaggctattgttgctgctgctactttggccttttctgtttactcaaccgttacttcaggcttactcttggtgtttatgactacttggtctctacacaagaatttaggtatatgaactcccaggggcttttgcctcctaagagtagtattgatgctttcaagcttaacattaagttgttgggtattggaggtaaaccatgtatcaaggttgctactgtacagtctaaaatgtctgacgtaaagtgcacatctgtggtactgctctcggttcttcaacaacttagagtagagtcatcttctaaattgtgggcacaatgtgtacaactccacaatgatattcttcttgcaaaagacacaactgaagctttcgagaagatggtttctcttttgtctgttttgctatccatgcagggtgctgtagacattaataggttgtgcgaggaaatgctcgataaccgtgctactcttcaggctattgcttcagaatttagttctttaccatcatatgccgcttatgccactgcccaggaggcctatgagcaggctgtagctaatggtgattctgaagtcgttctcaaaaagttaaagaaatctttgaatgtggctaaatctgagtttgaccgtgatgctgccatgcaacgcaagttggaaaagatggcagatcaggctatgacccaaatgtacaaacaggcaagatctgaggacaagagggcaaaagtaactagtgctatgcaaacaatgctcttcactatgcttaggaagcttgataatgatgcacttaacaacattatcaacaatgcgcgtgatggttgtgttccactcaacatcataccattgactacagcagccaaactcatggttgttgtccctgattatggtacctacaagaacacttgtgatggtaacacctttacatatgcatctgcactctgggaaatccagcaagttgttgatgcggatagcaagattgttcaacttagtgaaattaacatggacaattcaccaaatttggcttggcctcttattgttacagctctaagagccaactcagctgttaaactacagaataatgaactgagtccagtagcactacgacagatgtcctgtgcggctggtaccacacaaacagcttgtactgatgacaatgcacttgcctactataacaattcgaagggaggtaggtttgtgctggcattactatcagaccaccaagatctcaaatgggctagattccctaagagtgatggtacaggtacaatttacacagaactggaaccaccttgtaggtttgttacagacacaccaaaagggcctaaagtgaaatacttgtacttcatcaaaggcttaaacaacctaaatagaggtatggtgctgggcagtttagctgctacagtacgtcttcaggctggaaatgctacagaagtacctgccaattcaactgtgctttccttctgtgcttttgcagtagaccctgctaaagcatataaggattacctagcaagtggaggacaaccaatcaccaactgtgtgaagatgttgtgtacacacactggtacaggacaggcaattactgtaacaccagaagctaacatggaccaagagtcctttggtggtgcttcatgttgtctgtattgtagatgccacattgaccatccaaatcctaaaggattctgtgacttgaaaggtaagtacgtccaaatacctaccacttgtgctaatgacccagtgggttttacacttagaaacacagtctgtaccgtctgcggaatgtggaaaggttatggctgtagttgtgaccaactccgcgaacccttgatgcagtctgcggatgcatcaacgtttttaaacgggtttgcggtgtaagtgcagcccgtcttacaccgtgcggcacaggcactagtactgatgtcgtctacagggcttttgatatttacaacgaaaaagttgctggttttgcaaagttcctaaaaactaattgctgtcgcttccaggagaaggatgaggaaggcaatttattagactcttactttgtagttaagaggcatactatgtctaactaccaacatgaagagactatttataacttggttaaagattgtccagcggttgctgtccatgactttttcaagtttagagtagatggtgacatggtaccacatatatcacgtcagcgtctaactaaatacacaatggctgatttagtctatgctctacgtcattttgatgagggtaattgtgatacattaaaagaaatactcgtcacatacaattgctgtgatgatgattatttcaataagaaggattggtatgacttcgtagagaatcctgacatcttacgcgtatatgctaacttaggtgagcgtgtacgccaatcattattaaagactgtacaattctgcgatgctatgcgtgatgcaggcattgtaggcgtactgacattagataatcaggatcttaatgggaactggtacgatttcggtgatttcgtacaagtagcaccaggctgcggagttcctattgtggattcatattactcattgctgatgcccatcctcactttgactagggcattggctgctgagtcccatatggatgctgatctcgcaaaaccacttattaagtgggatttgctgaaatatgattttacggaagagagactttgtctcttcgaccgttattttaaatattgggaccagacataccatcccaattgtattaactgtttggatgataggtgtatccttcattgtgcaaactttaatgtgttattttctactgtgtttccacctacaagttttggaccactagtaagaaaaatatttgtagatggtgttccttttgttgtttcaactggataccattttcgtgagttaggagtcgtacataatcaggatgtaaacttacatagctcgcgtctcagtttcaaggaacttttagtgtatgctgctgatccagctatgcatgcagcttctggcaatttattgctagataaacgcactacatgcttttcagtagctgcactaacaaacaatgttgcttttcaaactgtcaaacccggtaattttaataaagacttttatgactttgctgtgtctaaaggtttctttaaggaaggaagttctgttgaactaaaacacttcttctttgctcaggatggcaacgctgctatcagtgattatgactattatcgttataatctgccaacaatgtgtgatatcagacaactcctattcgtagttgaagttgttgataaatactttgattgttacgatggtggctgtattaatgccaaccaagtaatcgttaacaatctggataaatcagctggtttcccatttaataaatggggtaaggctagactttattatgactcaatgagttatgaggatcaagatgcacttttcgcgtatactaagcgtaatgtcatccctactataactcaaatgaatcttaagtatgccattagtgcaaagaatagagctcgcaccgtagctggtgtctctatctgtagtactatgacaaatagacagtttcatcagaaattattgaagtcaatagccgccactagaggagctactgtggtaattggaacaagcaagttttacggtggctggcataatatgttaaaaactgtttacagtgatgtagaaactccacaccttatgggttgggattatccaaaatgtgacagagccatgcctaacatgcttaggataatggcctctcttgttcttgctcgcaaacataacacttgctgtaacttatcacaccgtttctacaggttagctaacgagtgtgcgcaagtattaagtgagatggtcatgtgtggcggctcactatatgttaaaccaggtggaacatcatccggtgatgctacaactgcttatgctaatagtgtctttaacatttgtcaagctgttacagccaatgtaaatgcacttctttcaactgatggtaataagatagctgacaagtatgtccgcaatctacaacacaggctctatgagtgtctctatagaaatagggatgttgatcatgaattcgtggatgagttttacgcttacctgcgtaaacatttctccatgatgattctttctgatgatgccgttgtgtgctataacagtaactatgcggctcaaggtttagtagctagcattaagaactttaaggcagttctttattatcaaaataatgtgttcatgtctgaggcaaaatgttggactgagactgaccttactaaaggacctcacgaattttgctcacagcatacaatgctagttaaacaaggagatgattacgtgtacctgccttacccagatccatcaagaatattaggcgcaggctgttttgtcgatgatattgtcaaaacagatggtacacttatgattgaaaggttcgtgtcactggctattgatgcttacccacttacaaaacatcctaatcaggagtatgctgatgtctttcacttgtatttacaatacattagaaagttacatgatgagcttactggccacatgttggacatgtattccgtaatgctaactaatgataacacctcacggtactgggaacctgagttttatgaggctatgtacacaccacatacagtcttgcaggctgtaggtgcttgtgtattgtgcaattcacagacttcacttcgttgcggtgcctgtattaggagaccattcctatgttgcaagtgctgctatgaccatgtcatttcaacatcacacaaattagtgttgtctgttaatccctatgtttgcaatgccccaggttgtgatgtcactgatgtgacacaactgtatctaggaggtatgagctattattgcaagtcacataagcctcccattagttttccattatgtgctaatggtcaggtttttggtttatacaaaaacacatgtgtaggcagtgacaatgtcactgacttcaatgcgatagcaacatgtgattggactaatgctggcgattacatacttgccaacacttgtactgagagactcaagcttttcgcagcagaaacgctcaaagccactgaggaaacatttaagctgtcatatggtattgccactgtacgcgaagtactctctgacagagaattgcatctttcatgggaggttggaaaacctagaccaccattgaacagaaactatgtctttactggttaccgtgtaactaaaaatagtaaagtacagattggagagtacacctttgaaaaaggtgactatggtgatgctgttgtgtacagaggtactacgacatacaagttgaatgttggtgattactttgtgttgacatctcacactgtaatgccacttagtgcacctactctagtgccacaagagcactatgtgagaattactggcttgtacccaacactcaacatctcagatgagttttctagcaatgttgcaaattatcaaaaggtcggcatgcaaaagtactctacactccaaggaccacctggtactggtaagagtcattttgccatcggacttgctctctattacccatctgctcgcatagtgtatacggcatgctctcatgcagctgttgatgccctatgtgaaaaggcattaaaatatttgcccatagataaatgtagtagaatcatacctgcgcgtgcgcgcgtagagtgttttgataaattcaaagtgaattcaacactagaacagtatgttttctgcactgtaaatgcattgccagaaacaactgctgacattgtagtctttgatgaaatctctatggctactaattatgacttgagtgttgtcaatgctagacttcgtgcaaaacactacgtctatattggcgatcctgctcaattaccagccccccgcacattgctgactaaaggcacactagaaccagaatattttaattcagtgtgcagacttatgaaaacaataggtccagacatgttccttggaacttgtcgccgttgtcctgctgaaattgttgacactgtgagtgctttagtttatgacaataagctaaaagcacacaaggataagtcagctcaatgcttcaaaatgttctacaaaggtgttattacacatgatgtttcatctgcaatcaacagacctcaaataggcgttgtaagagaatttcttacacgcaatcctgcttggagaaaagctgtttttatctcaccttataattcacagaacgctgtagcttcaaaaatcttaggattgcctacgcagactgttgattcatcacagggttctgaatatgactatgtcatattcacacaaactactgaaacagcacactcttgtaatgtcaaccgcttcaatgtggctatcacaagggcaaaaattggcattttgtgcataatgtctgatagagatctttatgacaaactgcaatttacaagtctagaaataccacgtcgcaatgtggctacattacaagcagaaaatgtaactggactttttaaggactgtagtaagatcattactggtcttcatcctacacaggcacctacacacctcagcgttgatataaagttcaagactgaaggattatgtgttgacataccaggcataccaaaggacatgacctaccgtagactcatctctatgatgggtttcaaaatgaattaccaagtcaatggttaccctaatatgtttatcacccgcgaagaagctattcgtcacgttcgtgcgtggattggctttgatgtagagggctgtcatgcaactagagatgctgtgggtactaacctacctctccagctaggattttctacaggtgttaacttagtagctgtaccgactggttatgttgacactgaaaataacacagaattcaccagagttaatgcaaaacctccaccaggtgaccagtttaaacatcttataccactcatgtataaaggcttgccctggaatgtagtgcgtattaagatagtacaaatgctcagtgatacactgaaaggattgtcagacagagtcgtgttcgtcctttgggcgcatggctttgagcttacatcaatgaagtactttgtcaagattggacctgaaagaacgtgttgtctgtgtgacaaacgtgcaacttgcttttctacttcatcagatacttatgcctgctggaatcattctgtgggttttgactatgtctataacccatttatgattgatgttcagcagtggggctttacgggtaaccttcagagtaaccatgaccaacattgccaggtacatggaaatgcacatgtggctagttgtgatgctatcatgactagatgtttagcagtccatgagtgctttgttaagcgcgttgattggtctgttgaataccctattataggagatgaactgagggttaattctgcttgcagaaaagtacaacacatggttgtgaagtctgcattgcttgctgataagtttccagttcttcatgacattggaaatccaaaggctatcaagtgtgtgcctcaggctgaagtagaatggaagttctacgatgctcagccatgtagtgacaaagcttacaaaatagaggaactcttctattcttatgctacacatcacgataaattcactgatggtgtttgtttgttttggaattgtaacgttgatcgttacccagccaatgcaattgtgtgtaggtttgacacaagagtcttgtcaaacttgaacttaccaggctgtgatggtggtagtttgtatgtgaataagcatgcattccacactccagctttcgataaaagtgcatttactaatttaaagcaattgcctttcttttactattctgatagtccttgtgagtctcatggcaaacaagtagtgtcggatattgattatgttccactcaaatctgctacgtgtattacacgatgcaatttaggtggtgctgtttgcagacaccatgcaaatgagtaccgacagtacttggatgcatataatatgatgatttctgctggatttagcctatggatttacaaacaatttgatacttataacctgtggaatacatttaccaggttacagagtttagaaaatgtggcttataatgttgttaataaaggacactttgatggacacgccggcgaagcacctgtttccatcattaataatgctgtttacacaaaggtagatggtattgatgtggagatctttgaaaataagacaacacttcctgttaatgttgcatttgagctttgggctaagcgtaacattaaaccagtgccagagattaagatactcaataatttgggtgttgatatcgctgctaatactgtaatctgggactacaaaagagaagccccagcacatgtatctacaataggtgtctgcacaatgactgacattgccaagaaacctactgagagtgcttgttcttcacttactgtcttgtttgatggtagagtggaaggacaggtagacctttttagaaacgcccgtaatggtgttttaataacagaaggttcagtcaaaggtctaacaccttcaaagggaccagcacaagctagcgtcaatggagtcacattaattggagaatcagtaaaaacacagtttaactactttaagaaagtagacggcattattcaacagttgcctgaaacctactttactcagagcagagacttagaggattttaagcccagatcacaaatggaaactgactttctcgagctcgctatggatgaattcatacagcgatataagctcgagggctatgccttcgaacacatcgtttatggagatttcagtcatggacaacttggcggtcttcatttaatgataggcttagccaagcgctcacaagattcaccacttaaattagaggattttatccctatggacagcacagtgaaaaattacttcataacagatgcgcaaacaggttcatcaaaatgtgtgtgttctgtgattgatcttttacttgatgactttgtcgagataataaagtcacaagatttgtcagtgatttcaaaagtggtcaaggttacaattgactatgctgaaatttcattcatgctttggtgtaaggatggacatgttgaaaccttctacccaaaactacaagcaagtcaagcgtggcaaccaggtgttgcgatgcctaacttgtacaagatgcaaagaatgcttcttgaaaagtgtgaccttcagaattatggtgaaaatgctgttataccaaaaggaataatgatgaatgtcgcaaagtatactcaactgtgtcaatacttaaatacacttactttagctgtaccctacaacatgagagttattcactttggtgctggctctgataaaggagttgcaccaggtacagctgtgctcagacaatggttgccaactggcacactacttgtcgattcagatcttaatgacttcgtctccgacgcagattctactttaattggagactgtgcaacagtacatacggctaataaatgggaccttattattagcgatatgtatgaccctaggaccaaacatgtgacaaaagagaatgactctaaagaagggtttttcacttatctgtgtggatttataaagcaaaaactagccctgggtggttctatagctgtaaagataacagagcattcttggaatgctgacctttacaagcttatgggccatttctcatggtggacagcttttgttacaaatgtaaatgcatcatcatcggaagcatttttaattggggctaactatcttggcaagccgaaggaacaaattgatggctataccatgcatgctaactacattttctggaggaacacaaatcctatccagttgtcttcctattcactctttgacatgagcaaatttcctcttaaattaagaggaactgctgtaatgtctcttaaggagaatcaaatcaatgatatgatttattctcttctggaaaaaggtaggcttatcattagagaaaacaacagagttgtggtttcaagtgatattcttgttaacaactaaacgaacatgtttattttcttattatttcttactctcactagtggtagtgaccttgaccggtgcaccacttttgatgatgttcaagctcctaattacactcaacatacttcatctatgaggggggtttactatcctgatgaaatttttagatcagacactctttatttaactcaggatttatttcttccattttattctaatgttacagggtttcatactattaatcatacgtttggcaaccctgtcataccttttaaggatggtatttattttgctgccacagagaaatcaaatgttgtccgtggttgggtttttggttctaccatgaacaacaagtcacagtcggtgattattattaacaattctactaatgttgttatacgagcatgtaactttgaattgtgtgacaaccctttctttgctgtttctaaacccatgggtacacagacacatactatgatattcgataatgcatttaattgcactttcgagtacatatctgatgccttttcgcttgatgtttcagaaaagtcaggtaattttaaacacttacgagagtttgtgtttaaaaataaagatgggtttctctatgtttataagggctatcaacctatagatgtagttcgtgatctaccttctggttttaacactttgaaacctatttttaagttgcctcttggtattaacattacaaattttagagccattcttacagccttttcacctgctcaagacatttggggcacgtcagctgcagcctattttgttggctatttaaagccaactacatttatgctcaagtatgatgaaaatggtacaatcacagatgctgttgattgttctcaaaatccacttgctgaactcaaatgctctgttaagagctttgagattgacaaaggaatttaccagacctctaatttcagggttgttccctcaggagatgttgtgagattccctaatattacaaacttgtgtccttttggagaggtttttaatgctactaaattcccttctgtctatgcatgggagagaaaaaaaatttctaattgtgttgctgattactctgtgctctacaactcaacatttttttcaacctttaagtgctatggcgtttctgccactaagttgaatgatctttgcttctccaatgtctatgcagattcttttgtagtcaagggagatgatgtaagacaaatagcgccaggacaaactggtgttattgctgattataattataaattgccagatgatttcatgggttgtgtccttgcttggaatactaggaacattgatgctacttcaactggtaattataattataaatataggtatcttagacatggcaagcttaggccctttgagagagacatatctaatgtgcctttctcccctgatggcaaaccttgcaccccacctgctcttaattgttattggccattaaatgattatggtttttacaccactactggcattggctaccaaccttacagagttgtagtactttcttttgaacttttaaatgcaccggccacggtttgtggaccaaaattatccactgaccttattaagaaccagtgtgtcaattttaattttaatggactcactggtactggtgtgttaactccttcttcaaagagatttcaaccatttcaacaatttggccgtgatgtttctgatttcactgattccgttcgagatcctaaaacatctgaaatattagacatttcaccttgctcttttgggggtgtaagtgtaattacacctggaacaaatgcttcatctgaagttgctgttctatatcaagatgttaactgcactgatgtttctacagcaattcatgcagatcaactcacaccagcttggcgcatatattctactggaaacaatgtattccagactcaagcaggctgtcttataggagctgagcatgtcgacacttcttatgagtgcgacattcctattggagctggcatttgtgctagttaccatacagtttctttattacgtagtactagccaaaaatctattgtggcttatactatgtctttaggtgctgatagttcaattgcttactctaataacaccattgctatacctactaacttttcaattagcattactacagaagtaatgcctgtttctatggctaaaacctccgtagattgtaatatgtacatctgcggagattctactgaatgtgctaatttgcttctccaatatggtagcttttgcacacaactaaatcgtgcactctcaggtattgctgctgaacaggatcgcaacacacgtgaagtgttcgctcaagtcaaacaaatgtacaaaaccccaactttgaaatattttggtggttttaatttttcacaaatattacctgaccctctaaagccaactaagaggtcttttattgaggacttgctctttaataaggtgacactcgctgatgctggcttcatgaagcaatatggcgaatgcctaggtgatattaatgctagagatctcatttgtgcgcagaagttcaatggacttacagtgttgccacctctgctcactgatgatatgattgctgcctacactgctgctctagttagtggtactgccactgctggatggacatttggtgctggcgctgctcttcaaataccttttgctatgcaaatggcatataggttcaatggcattggagttacccaaaatgttctctatgagaaccaaaaacaaatcgccaaccaatttaacaaggcgattagtcaaattcaagaatcacttacaacaacatcaactgcattgggcaagctgcaagacgttgttaaccagaatgctcaagcattaaacacacttgttaaacaacttagctctaattttggtgcaatttcaagtgtgctaaatgatatcctttcgcgacttgataaagtcgaggcggaggtacaaattgacaggttaattacaggcagacttcaaagccttcaaacctatgtaacacaacaactaatcagggctgctgaaatcagggcttctgctaatcttgctgctactaaaatgtctgagtgtgttcttggacaatcaaaaagagttgacttttgtggaaagggctaccaccttatgtccttcccacaagcagccccgcatggtgttgtcttcctacatgtcacgtatgtgccatcccaggagaggaacttcaccacagcgccagcaatttgtcatgaaggcaaagcatacttccctcgtgaaggtgtttttgtgtttaatggcacttcttggtttattacacagaggaacttcttttctccacaaataattactacagacaatacatttgtctcaggaaattgtgatgtcgttattggcatcattaacaacacagtttatgatcctctgcaacctgagcttgactcattcaaagaagagctggacaagtacttcaaaaatcatacatcaccagatgttgatcttggcgacatttcaggcattaacgcttctgtcgtcaacattcaaaaagaaattgaccgcctcaatgaggtcgctaaaaatttaaatgaatcactcattgaccttcaagaattgggaaaatatgagcaatatattaaatggccttggtatgtttggctcggcttcattgctggactaattgccatcgtcatggttacaatcttgctttgttgcatgactagttgttgcagttgcctcaagggtgcatgctcttgtggttcttgctgcaagtttgatgaggatgactctgagccagttctcaagggtgtcaaattacattacacataaacgaacttatggatttgtttatgagattttttactcttggatcaattactgcacagccagtaaaaattgacaatgcttctcctgcaagtactgttcatgctacagcaacgataccgctacaagcctcactccctttcggatggcttgttattggcgttgcatttcttgctgtttttcagagcgctaccaaaataattgcgctcaataaaagatggcagctagccctttataagggcttccagttcatttgcaatttactgctgctatttgttaccatctattcacatcttttgcttgtcgctgcaggtatggaggcgcaatttttgtacctctatgccttgatatattttctacaatgcatcaacgcatgtagaattattatgagatgttggctttgttggaagtgcaaatccaagaacccattactttatgatgccaactactttgtttgctggcacacacataactatgactactgtataccatataacagtgtcacagatacaattgtcgttactgaaggtgacggcatttcaacaccaaaactcaaagaagactaccaaattggtggttattctgaggataggcactcaggtgttaaagactatgtcgttgtacatggctatttcaccgaagtttactaccagcttgagtctacacaaattactacagacactggtattgaaaatgctacattcttcatctttaacaagcttgttaaagacccaccgaatgtgcaaatacacacaatcgacggctcttcaggagttgctaatccagcaatggatccaatttatgatgagccgacgacgactactagcgtgcctttgtaagcacaagaaagtgagtacgaacttatgtactcattcgtttcggaagaaacaggtacgttaatagttaatagcgtacttctttttcttgctttcgtggtattcttgctagtcacactagccatccttactgcgcttcgattgtgtgcgtactgctgcaatattgttaacgtgagtttagtaaaaccaacggtttacgtctactcgcgtgttaaaaatctgaactcttctgaaggagttcctgatcttctggtctaaacgaactaactattattattattctgtttggaactttaacattgcttatcatggcagacaacggtactattaccgttgaggagcttaaacaactcctggaacaatggaacctagtaataggtttcctattcctagcctggattatgttactacaatttgcctattctaatcggaacaggtttttgtacataataaagcttgttttcctctggctcttgtggccagtaacacttgcttgttttgtgcttgctgctgtctacagaattaattgggtgactggcgggattgcgattgcaatggcttgtattgtaggcttgatgtggcttagctacttcgttgcttccttcaggctgtttgctcgtacccgctcaatgtggtcattcaacccagaaacaaacattcttctcaatgtgcctctccgggggacaattgtgaccagaccgctcatggaaagtgaacttgtcattggtgctgtgatcattcgtggtcacttgcgaatggccggacactccctagggcgctgtgacattaaggacctgccaaaagagatcactgtggctacatcacgaacgctttcttattacaaattaggagcgtcgcagcgtgtaggcactgattcaggttttgctgcatacaaccgctaccgtattggaaactataaattaaatacagaccacgccggtagcaacgacaatattgctttgctagtacagtaagtgacaacagatgtttcatcttgttgacttccaggttacaatagcagagatattgattatcattatgaggactttcaggattgctatttggaatcttgacgttataataagttcaatagtgagacaattatttaagcctctaactaagaagaattattcggagttagatgatgaagaacctatggagttarattatccataaaacgaacatgaaaattattctcttcctgacattgattgtatttacatcttgcgagctatatcactatcaggagtgtgttagaggtacgactgtactactaaaagaaccttgcccatcaggaacatacgagggcaattcaccatttcaccctcttgctgacaataaatttgcactaacttgcactagcacacactttgcttttgcttgtgctgacggtactcgacatacctatcagctgcgtgcaagatcagtttcaccaaaacttttcatcagacaagaggaggttcaacaagagctctactcgccactttttctcattgttgctgctctagtatttttaatactttgcttcaccattaagagaaagacagaatgaatgagctcactttaattgacttctatttgtgctttttagcctttctgctattccttgttttaataatgcttattatattttggttttcactcgaaatccaggatctagaagaaccttgtaccaaagtctaaacgaacatgaaacttctcattgttttgacttgtatttctctatgcagttgcatatgcactgtagtacagcgctgtgcatctaataaacctcatgtgcttgaagatccttgtaaggtacaacactaggggtaatacttatagcactgcttggctttgtgctctaggaaaggttttaccttttcatagatggcacactatggttcaaacatgcacacctaatgttactatcaactgtcaagatccagctggtggtgcgcttatagctaggtgttggtaccttcatgaaggtcaccaaactgctgcatttagagacgtacttgttgttttaaataaacgaacaaattaaaatgtctgataatggaccccaatcaaaccaacgtagtgccccccgcattacatttggtggacccacagattcaactgacaataaccagaatggaggacgcaatggggcaaggccaaaacagcgccgaccccaaggtttacccaataatactgcgtcttggttcacagctctcactcagcatggcaaggaggaacttagattccctcgaggccagggcgttccaatcaacaccaatagtggtccagatgaccaaattggctactaccgaagagctacccgacgagttcgtggtggtgacggcaaaatgaaagagctcagccccagatggtacttctattacctaggaactggcccagaagcttcacttccctacggcgctaacaaagaaggcatcgtatgggttgcaactgagggagccttgaatacacccaaagaccacattggcacccgcaatcctaataacaatgctgccaccgtgctacaacttcctcaaggaacaacattgccaaaaggcttctacgcagagggaagcagaggcggcagtcaagcctcttctcgctcctcatcacgtagtcgcggtaattcaagaaattcaactcctggcagcagtaggggaaattctcctgctcgaatggctagcggaggtggtgaaactgccctcgcgctattgctgctagacagattgaaccagcttgagagcaaagtttctggtaaaggccaacaacaacaaggccaaactgtcactaagaaatctgctgctgaggcatctaaaaagcctcgccaaaaacgtactgccacaaaacagtacaacgtcactcaagcatttgggagacgtggtccagaacaaacccaaggaaatttcggggaccaagacctaatcagacaaggaactgattacaaacattggccgcaaattgcacaatttgctccaagtgcctctgcattctttggaatgtcacgcattggcatggaagtcacaccttcgggaacatggctgacttatcatggagccattaaattggatgacaaagatccacaattcaaagacaacgtcatactgctgaacaagcacattgacgcatacaaaacattcccaccaacagagcctaaaaaggacaaaaagaaaaagactgatgaagctcagcctttgccgcagagacaaaagaagcagcccactgtgactcttcttcctgcggctgacatggatgatttctccagacaacttcaaaattccatgagtggagcttctgctgattcaactcaggcataaacactcatgatgaccacacaaggcagatgggctatgtaaacgttttcgcaattccgtttacgatacatagtctactcttgtgcagaatgaattctcgtaactaaacagcacaagtaggtttagttaactttaatctcacatagcaatctttaatcaatgtgtaacattagggaggacttgaaagagccaccacattttcatcgaggccacgcggagtacgatcgagggtacagtgaataatgctagggagagctgcctatatggaagagccctaatgtgtaaaattaattttagtagtgctatccccatgtgattttaatagcttcttaggagaatgacaaaaaaaaaaaaaaaaaaaaaaaa

SEQ ID NO: 63 - DNA, 29751 bp, Coronavirus
atattaggtttttacctacccaggaaaagccaaccaacctcgatctcttgtagatctgttctctaaacgaactttaaaatctgtgtagctgtcgctcggctgcatgcctagtgcacctacgcagtataaacaataataaattttactgtcgttgacaagaaacgagtaactcgtccctcttctgcagactgcttacggtttcgtccgtgttgcagtcgatcatcagcatacctaggtttcgtccgggtgtgaccgaaaggtaagatggagagccttgttcttggtgtcaacgagaaaacacacgtccaactcagtttgcctgtccttcaggttagagacgtgctagtgcgtggcttcggggactctgtggaagaggccctatcggaggcacgtgaacacctcaaaaatggcacttgtggtctagtagagctggaaaaaggcgtactgccccagcttgaacagccctatgtgttcattaaacgttctgatgccttaagcaccaatcacggccacaaggtcgttgagctggttgcagaaatggacggcattcagtacggtcgtagcggtataacactgggagtactcgtgccacatgtgggcaaaaccccaattgcataccgcaatgttcttcttcgtaagaacggtaataagggagccggtggtcatagctatggcatcgatctaaagtcttatgacttaggtgacgagcttggcactgatcccattgaagattatgaacaaaactggaacactaagcatggcagtggtgcactccgtgaactcactcgtgagctcaatggaggtgcagtcactcgctatgtcgacaacaatttctgtggcccagatgggtaccctcttgattgcatcaaagattttctcgcacgcgcgggcaagtcaatgtgcactctttccgaacaacttgattacatcgagtcgaagagaggtgtctactgctgccgtgaccatgagcatgaaattgcctggttcactgagcgctctgataagagctacgagcaccagacacccttcgaaattaagagtgccaagaaatttgacactttcaaaggggaatgcccaaagtttgtgtttcctcttaactcaaaagtcaaagtcattcaaccacgtgttgaaaagaaaaagactgagggtttcatggggcgtatacgctctgtgtaccctgttgcatctccacaggagtgtaacaatatgcacttgtctaccttgatgaaatgtaatcattgcgatgaagtttcatggcagacgtgcgactttctgaaagccacttgtgaacattgtggcactgaaaatttagttattgaaggacctactacatgtgggtacctacctactaatgctgtagtgaaaatgccatgtcctgcctgtcaagacccagagattggacctgagcatagtgttgcagattatcacaaccactcaaacattgaaactcgactccgcaagggaggtaggactagatgttttggaggctgtgtgtttgcctatgttggctgctataataagcgtgcctactgggttcctcgtgctagtgctgatattggctcaggccatactggcattactggtgacaatgtggagaccttgaatgaggatctccttgagatactgagtcgtgaacgtgttaacattaacattgttggcgattttcatttgaatgaagaggttgccatcattttggcatctttctctgcttctacaagtgcctttattgacactataaagagtcttgattacaagtctttcaaaaccattgttgagtcctgcggtaactataaagttaccaagggaaagcccgtaaaaggtgcttggaacattggacaacagagatcagttttaacaccactgtgtggttttccctcacaggctgctggtgttatcagatcaatttttgcgcgcacacttgatgcagcaaaccactcaattcctgatttgcaaagagcagctgtcaccatacttgatggtatttctgaacagtcattacgtcttgtcgacgccatggtttatacttcagacctgctcaccaacagtgtcattattatggcatatgtaactggtggtcttgtacaacagacttctcagtggttgtctaatcttttgggcactactgttgaaaaactcaggcctatctttgaatggattgaggcgaaacttagtgcaggagttgaatttctcaaggatgcttgggagattctcaaatttctcattacaggtgtttttgacatcgtcaagggtcaaatacaggttgcttcagataacatcaaggattgtgtaaaatgcttcattgatgttgttaacaaggcactcgaaatgtgcattgatcaagtcactatcgctggcgcaaagttgcgatcactcaacttaggtgaagtcttcatcgctcaaagcaagggactttaccgtcagtgtatacgtggcaaggagcagctgcaactactcatgcctcttaaggcaccaaaagaagtaacctttcttgaaggtgattcacatgacacagtacttacctctgaggaggttgttctcaagaacggtgaactcgaagcactcgagacgcccgttgatagcttcacaaatggagctatcgttggcacaccagtctgtgtaaatggcctcatgctcttagagattaaggacaaagaacaatactgcgcattgtctcctggtttactggctacaaacaatgtctttcgcttaaaagggggtgcaccaattaaaggtgtaacctttggagaagatactgtttgggaagttcaaggttacaagaatgtgagaatcacatttgagcttgatgaacgtgttgacaaagtgcttaatgaaaagtgctctgtctacactgttgaatccggtaccgaagttactgagtttgcatgtgttgtagcagaggctgttgtgaagactttacaaccagtttctgatctccttaccaacatgggtattgatcttgatgagtggagtgtagctacattctacttatttgatgatgctggtgaagaaaacttttcatcacgtatgtattgttccttttaccctccagatgaggaagaagaggacgatgcagagtgtgaggaagaagaaattgatgaaacctgtgaacatgagtacggtacagaggatgattatcaaggtctccctctggaatttggtgcctcagctgaaacagttcgagttgaggaagaagaagaggaagactggctggatgatactactgagcaatcagagattgagccagaaccagaacctacacctgaagaaccagttaatcagtttactggttatttaaaacttactgacaatgttgccattaaatgtgttgacatcgttaaggaggcacaaagtgctaatcctatggtgattgtaaatgctgctaacatacacctgaaacatggtggtggtgtagcaggtgcactcaacaaggcaaccaatggtgccatgcaaaaggagagtgatgattacattaagctaaatggccctcttacagtaggagggtcttgtttgctttctggacataatcttgctaagaagtgtctgcatgttgttggacctaacctaaatgcaggtgaggacatccagcttcttaaggcagcatatgaaaatttcaattcacaggacatcttacttgcaccattgttgtcagcaggcatatttggtgctaaaccacttcagtctttacaagtgtgcgtgcagacggttcgtacacaggtttatattgcagtcaatgacaaagctctttatgagcaggttgtcatggattatcttgataacctgaagcctagagtggaagcacctaaacaagaggagccaccaaacacagaagattccaaaactgaggagaaatctgtcgtacagaagcctgtcgatgtgaagccaaaaattaaggcctgcattgatgaggttaccacaacactggaagaaactaagtttcttaccaataagttactcttgtttgctgatatcaatggtaagctttaccatgattctcagaacatgcttagaggtgaagatatgtctttccttgagaaggatgcaccttacatggtaggtgatgttatcactagtggtgatatcacttgtgttgtaataccctccaaaaaggctggtggcactactgagatgctctcaagagctttgaagaaagtgccagttgatgagtatataaccacgtaccctggacaaggatgtgctggttatacacttgaggaagctaagactgctcttaagaaatgcaaatctgcattttatgtactaccttcagaagcacctaatgctaaggaagagattctaggaactgtatcctggaatttgagagaaatgcttgctcatgctgaagagacaagaaaattaatgcctatatgcatggatgttagagccataatggcaaccatccaacgtaagtataaaggaattaaaattcaagagggcatcgttgactatggtgtccgattcttcttttatactagtaaagagcctgtagcttctattattacgaagctgaactctctaaatgagccgcttgtcacaatgccaattggttatgtgacacatggttttaatcttgaagaggctgcgcgctgtatgcgttctcttaaagctcctgccgtagtgtcagtatcatcaccagatgctgttactacatataatggatacctcacttcgtcatcaaagacatctgaggagcactttgtagaaacagtttctttggctggctcttacagagattggtcctattcaggacagcgtacagagttaggtgttgaatttcttaagcgtggtgacaaaattgtgtaccacactctggagagccccgtcgagtttcatcttgacggtgaggttctttcacttgacaaactaaagagtctcttatccctgcgggaggttaagactataaaagtgttcacaactgtggacaacactaatctccacacacagcttgtggatatgtctatgacatatggacagcagtttggtccaacatacttggatggtgctgatgttacaaaaattaaacctcatgtaaatcatgagggtaagactttctttgtactacctagtgatgacacactacgtagtgaagctttcgagtactaccatactcttgatgagagttttcttggtaggtacatgtctgctttaaaccacacaaagaaatggaaatttcctcaagttggtggtttaacttcaattaaatgggctgataacaattgttatttgtctagtgttttattagcacttcaacagcttgaagtcaaattcaatgcaccagcacttcaagaggcttattatagagcccgtgctggtgatgctgctaacttttgtgcactcatactcgcttacagtaataaaactgttggcgagcttggtgatgtcagagaaactatgacccatcttctacagcatgctaatttggaatctgcaaagcgagttcttaatgtggtgtgtaaacattgtggtcagaaaactactaccttaacgggtgtagaagctgtgatgtatatgggtactctatcttatgataatcttaagacaggtgtttccattccatgtgtgtgtggtcgtgatgctacacaatatctagtacaacaagagtcttcttttgttatgatgtctgcaccacctgctgagtataaattacagcaaggtacattcttatgtgcgaatgagtacactggtaactatcagtgtggtcattacactcatataactgctaaggagaccctctatcgtattgacggagctcaccttacaaagatgtcagagtacaaaggaccagtgactgatgttttctacaaggaaacatcttacactacaaccatcaagcctgtgtcgtataaactcgatggagttacttacacagagattgaaccaaaattggatgggtattataaaaaggataatgcttactatacagagcagcctatagaccttgtaccaactcaaccattaccaaatgcgagttttgataatttcaaactcacatgttctaacacaaaatttgctgatgatttaaatcaaatgacaggcttcacaaagccagcttcacgagagctatctgtcacattcttcccagacttgaatggcgatgtagtggctattgactatagacactattcagcgagtttcaagaaaggtgctaaattactgcataagccaattgtttggcacattaaccaggctacaaccaagacaacgttcaaaccaaacacttggtgtttacgttgtctttggagtacaaagccagtagatacttcaaattcatttgaagttctggcagtagaagacacacaaggaatggacaatcttgcttgtgaaagtcaacaacccacctctgaagaagtagtggaaaatcctaccatacagaaggaagtcatagagtgtgacgtgaaaactaccgaagttgtaggcaatgtcatacttaaaccatcagatgaaggtgttaaagtaacacaagagttaggtcatgaggatcttatggctgcttatgtggaaaacacaagcattaccattaagaaacctaatgagctttcactagccttaggtttaaaaacaattgccactcatggtattgctgcaattaatagtgttccttggagtaaaattttggcttatgtcaaaccattcttaggacaagcagcaattacaacatcaaattgcgctaagagattagcacaacgtgtgtttaacaattatatgccttatgtgtttacattattgttccaattgtgtacttttactaaaagtaccaattctagaattagagcttcactacctacaactattgctaaaaatagtgttaagagtgttgctaaattatgtttggatgccggcattaattatgtgaagtcacccaaattttctaaattgttcacaatcgctatgtggctattgttgttaagtatttgcttaggttctctaatctgtgtaactgctgcttttggtgtactcttatctaattttggtgctccttcttattgtaatggcgttagagaattgtatcttaattcgtctaacgttactactatggatttctgtgaaggttcttttccttgcagcatttgtttaagtggattagactcccttgattcttatccagctcttgaaaccattcaggtgacgatttcatcgtacaagctagacttgacaattttaggtctggccgctgagtgggttttggcatatatgttgttcacaaaattcttttatttattaggtctttcagctataatgcaggtgttctttggctattttgctagtcatttcatcagcaattcttggctcatgtggtttatcattagtattgtacaaatggcacccgtttctgcaatggttaggatgtacatcttctttgcttctttctactacatatggaagagctatgttcatatcatggatggttgcacctcttcgacttgcatgatgtgctataagcgcaatcgtgccacacgcgttgagtgtacaactattgttaatggcatgaagagatctttctatgtctatgcaaatggaggccgtggcttctgcaagactcacaattggaattgtctcaattgtgacacattttgcactggtagtacattcattagtgatgaagttgctcgtgatttgtcactccagtttaaaagaccaatcaaccctactgaccagtcatcgtatattgttgatagtgttgctgtgaaaaatggcgcgcttcacctctactttgacaaggctggtcaaaagacctatgagagacatccgctctcccattttgtcaatttagacaatttgagagctaacaacactaaaggttcactgcctattaatgtcatagtttttgatggcaagtccaaatgcgacgagtctgcttctaagtctgcttctgtgtactacagtcagctgatgtgccaacctattctgttgcttgaccaagctcttgtatcagacgttggagatagtactgaagtttccgttaagatgtttgatgcttatgtcgacaccttttcagcaacttttagtgttcctatggaaaaacttaaggcacttgttgctacagctcacagcgagttagcaaagggtgtagctttagatggtgtcctttctacattcgtgtcagctgcccgacaaggtgttgttgataccgatgttgacacaaaggatgttattgaatgtctcaaactttcacatcactctgacttagaagtgacaggtgacagttgtaacaatttcatgctcacctataataaggttgaaaacatgacgcccagagatcttggcgcatgtattgactgtaatgcaaggcatatcaatgcccaagtagcaaaaagtcacaatgtttcactcatctggaatgtaaaagactacatgtctttatctgaacagctgcgtaaacaaattcgtagtgctgccaagaagaacaacataccttttagactaacttgtgctacaactagacaggttgtcaatgtcataactactaaaatctcactcaagggtggtaagattgttagtacttgttttaaacttatgcttaaggccacattattgtgcgttcttgctgcattggtttgttatatcgttatgccagtacatacattgtcaatccatgatggttacacaaatgaaatcattggttacaaagccattcaggatggtgtcactcgtgacatcatttctactgatgattgttttgcaaataaacatgctggttttgacgcatggtttagccagcgtggtggttcatacaaaaatgacaaaagctgccctgtagtagctgctatcattacaagagagattggtttcatagtgcctggcttaccgggtactgtgctgagagcaatcaatggtgacttcttgcattttctacctcgtgtttttagtgctgttggcaacatttgctacacaccttccaaactcattgagtatagtgattttgctacctctgcttgcgttcttgctgctgagtgtacaatttttaaggatgctatgggcaaacctgtgccatattgttatgacactaatttgctagagggttctatttcttatagtgagcttcgtccagacactcgttatgtgcttatggatggttccatcatacagtttcctaacacttacctggagggttctgttagagtagtaacaacttttgatgctgagtactgtagacatggtacatgcgaaaggtcagaagtaggtatttgcctatctaccagtggtagatgggttcttaataatgagcattacagagctctatcaggagttttctgtggtgttgatgcgatgaatctcatagctaacatctttactcctcttgtgcaacctgtgggtgctttagatgtgtctgcttcagtagtggctggtggtattattgccatattggtgacttgtgctgcctactactttatgaaattcagacgtgtttttggtgagtacaaccatgttgttgctgctaatgcacttttgtttttgatgtctttcactatactctgtctggtaccagcttacagctttctgccgggagtctactcagtcttttacttgtacttgacattctatttcaccaatgatgtttcattcttggctcaccttcaatggtttgccatgttttctcctattgtgcctttttggataacagcaatctatgtattctgtatttctctgaagcactgccattggttctttaacaactatcttaggaaaagagtcatgtttaatggagttacatttagtaccttcgaggaggctgctttgtgtacctttttgctcaacaaggaaatgtacctaaaattgcgtagcgagacactgttgccacttacacagtataacaggtatcttgctctatataacaagtacaagtatttcagtggagccttagatactaccagctatcgtgaagcagcttgctgccacttagcaaaggctctaaatgactttagcaactcaggtgctgatgttctctaccaaccaccacagacatcaatcacttctgctgttctgcagagtggttttaggaaaatggcattcccgtcaggcaaagttgaagggtgcatggtacaagtaacctgtggaactacaactcttaatggattgtggttggatgacacagtatactgtccaagacatgtcatttgcacagcagaagacatgcttaatcctaactatgaagatctgctcattcgcaaatccaaccatagctttcttgttcaggctggcaatgttcaacttcgtgttattggccattctatgcaaaattgtctgcttaggcttaaagttgatacttctaaccctaagacacccaagtataaatttgtccgtatccaacctggtcaaacattttcagttctagcatgctacaatggttcaccatctggtgtttatcagtgtgccatgagacctaatcataccattaaaggttctttccttaatggatcatgtggtagtgttggttttaacattgattatgattgcgtgtctttctgctatatgcatcatatggagcttccaacaggagtacacgctggtactgacttagaaggtaaattctatggtccatttgttgacagacaaactgcacaggctgcaggtacagacacaaccataacattaaatgttttggcatggctgtatgctgctgttatcaatggtgataggtggtttcttaatagattcaccactactttgaatgactttaaccttgtggcaatgaagtacaactatgaacctttgacacaagatcatgttgacatattgggacctctttctgctcaaacaggaattgccgtcttagatatgtgtgctgctttgaaagagctgctgcagaatggtatgaatggtcgtactatccttggtagcactattttagaagatgagtttacaccatttgatgttgttagacaatgctctggtgttaccttccaaggtaagttcaagaaaattgttaagggcactcatcattggatgcttttaactttcttgacatcactattgattcttgttcaaagtacacagtggtcactgtttttctttgtttacgagaatgctttcttgccatttactcttggtattatggcaattgctgcatgtgctatgctgcttgttaagcataagcacgcattcttgtgcttgtttctgttaccttctcttgcaacagttgcttactttaatatggtctacatgcctgctagctgggtgatgcgtatcatgacatggcttgaattggctgacactagcttgtctggttataggcttaaggattgtgttatgtatgcttcagctttagttttgcttattctcatgacagctcgcactgtttatgatgatgctgctagacgtgtttggacactgatgaatgtcattacacttgtttacaaagtctactatggtaatgctttagatcaagctatttccatgtgggccttagttatttctgtaacctctaactattctggtgtcgttacgactatcatgtttttagctagagctatagtgtttgtgtgtgttgagtattacccattgttatttattactggcaacaccttacagtgtatcatgcttgtttattgtttcttaggctattgttgctgctgctactttggccttttctgtttactcaaccgttacttcaggcttactcttggtgtttatgactacttggtctctacacaagaatttaggtatatgaactcccaggggcttttgcctcctaagagtagtattgatgctttcaagcttaacattaagttgttgggtattggaggtaaaccatgtatcaaggttgctactgtacagtctaaaatgtctgacgtaaagtgcacatctgtggtactgctctcggttcttcaacaacttagagtagagtcatcttctaaattgtgggcacaatgtgtacaactccacaatgatattcttcttgcaaaagacacaactgaagctttcgagaagatggtttctcttttgtctgttttgctatccatgcagggtgctgtagacattaataggttgtgcgaggaaatgctcgataaccgtgctactcttcaggctattgcttcagaatttagttctttaccatcatatgccgcttatgccactgcccaggaggcctatgagcaggctgtagctaatggtgattctgaagtcgttctcaaaaagttaaagaaatctttgaatgtggctaaatctgagtttgaccgtgatgctgccatgcaacgcaagttggaaaagatggcagatcaggctatgacccaaatgtacaaacaggcaagatctgaggacaagagggcaaaagtaactagtgctatgcaaacaatgctcttcactatgcttaggaagcttgataatgatgcacttaacaacattatcaacaatgcgcgtgatggttgtgttccactcaacatcataccattgactacagcagccaaactcatggttgttgtccctgattatggtacctacaagaacacttgtgatggtaacacctttacatatgcatctgcactctgggaaatccagcaagttgttgatgcggatagcaagattgttcaacttagtgaaattaacatggacaattcaccaaatttggcttggcctcttattgttacagctctaagagccaactcagctgttaaactacagaataatgaactgagtccagtagcactacgacagatgtcctgtgcggctggtaccacacaaacagcttgtactgatgacaatgcacttgcctactataacaattcgaagggaggtaggtttgtgctggcattactatcagaccaccaagatctcaaatgggctagattccctaagagtgatggtacaggtacaatttacacagaactggaaccaccttgtaggtttgttacagacacaccaaaagggcctaaagtgaaatacttgtacttcatcaaaggcttaaacaacctaaatagaggtatggtgctgggcagtttagctgctacagtacgtcttcaggctggaaatgctacagaagtacctgccaattcaactgtgctttccttctgtgcttttgcagtagaccctgctaaagcatataaggattacctagcaagtggaggacaaccaatcaccaactgtgtgaagatgttgtgtacacacactggtacaggacaggcaattactgtaacaccagaagctaacatggaccaagagtcctttggtggtgcttcatgttgtctgtattgtagatgccacattgaccatccaaatcctaaaggattctgtgacttgaaaggtaagtacgtccaaatacctaccacttgtgctaatgacccagtgggttttacacttagaaacacagtctgtaccgtctgcggaatgtggaaaggttatggctgtagttgtgaccaactccgcgaacccttgatgcagtctgcggatgcatcaacgtttttaaacgggtttgcggtgtaagtgcagcccgtcttacaccgtgcggcacaggcactagtactgatgtcgtctacagggcttttgatatttacaacgaaaaagttgctggttttgcaaagttcctaaaaactaattgctgtcgcttccaggagaaggatgaggaaggcaatttattagactcttactttgtagttaagaggcatactatgtctaactaccaacatgaagagactatttataacttggttaaagattgtccagcggttgctgtccatgactttttcaagtttagagtagatggtgacatggtaccacatatatcacgtcagcgtctaactaaatacacaatggctgatttagtctatgctctacgtcattttgatgagggtaattgtgatacattaaaagaaatactcgtcacatacaattgctgtgatgatgattatttcaataagaaggattggtatgacttcgtagagaatcctgacatcttacgcgtatatgctaacttaggtgagcgtgtacgccaatcattattaaagactgtacaattctgcgatgctatgcgtgatgcaggcattgtaggcgtactgacattagataatcaggatcttaatgggaactggtacgatttcggtgatttcgtacaagtagcaccaggctgcggagttcctattgtggattcatattactcattgctgatgcccatcctcactttgactagggcattggctgctgagtcccatatggatgctgatctcgcaaaaccacttattaagtgggatttgctgaaatatgattttacggaagagagactttgtctcttcgaccgttattttaaatattgggaccagacataccatcccaattgtattaactgtttggatgataggtgtatccttcattgtgcaaactttaatgtgttattttctactgtgtttccacctacaagttttggaccactagtaagaaaaatatttgtagatggtgttccttttgttgtttcaactggataccattttcgtgagttaggagtcgtacataatcaggatgtaaacttacatagctcgcgtctcagtttcaaggaacttttagtgtatgctgctgatccagctatgcatgcagcttctggcaatttattgctagataaacgcactacatgcttttcagtagctgcactaacaaacaatgttgcttttcaaactgtcaaacccggtaattttaataaagacttttatgactttgctgtgtctaaaggtttctttaaggaaggaagttctgttgaactaaaacacttcttctttgctcaggatggcaacgctgctatcagtgattatgactattatcgttataatctgccaacaatgtgtgatatcagacaactcctattcgtagttgaagttgttgataaatactttgattgttacgatggtggctgtattaatgccaaccaagtaatcgttaacaatctggataaatcagctggtttcccatttaataaatggggtaaggctagactttattatgactcaatgagttatgaggatcaagatgcacttttcgcgtatactaagcgtaatgtcatccctactataactcaaatgaatcttaagtatgccattagtgcaaagaatagagctcgcaccgtagctggtgtctctatctgtagtactatgacaaatagacagtttcatcagaaattattgaagtcaatagccgccactagaggagctactgtggtaattggaacaagcaagttttacggtggctggcataatatgttaaaaactgtttacagtgatgtagaaactccacaccttatgggttgggattatccaaaatgtgacagagccatgcctaacatgcttaggataatggcctctcttgttcttgctcgcaaacataacacttgctgtaacttatcacaccgtttctacaggttagctaacgagtgtgcgcaagtattaagtgagatggtcatgtgtggcggctcactatatgttaaaccaggtggaacatcatccggtgatgctacaactgcttatgctaatagtgtctttaacatttgtcaagctgttacagccaatgtaaatgcacttctttcaactgatggtaataagatagctgacaagtatgtccgcaatctacaacacaggctctatgagtgtctctatagaaatagggatgttgatcatgaattcgtggatgagttttacgcttacctgcgtaaacatttctccatgatgattctttctgatgatgccgttgtgtgctataacagtaactatgcggctcaaggtttagtagctagcattaagaactttaaggcagttctttattatcaaaataatgtgttcatgtctgaggcaaaatgttggactgagactgaccttactaaaggacctcacgaattttgctcacagcatacaatgctagttaaacaaggagatgattacgtgtacctgccttacccagatccatcaagaatattaggcgcaggctgttttgtcgatgatattgtcaaaacagatggtacacttatgattgaaaggttcgtgtcactggctattgatgcttacccacttacaaaacatcctaatcaggagtatgctgatgtctttcacttgtatttacaatacattagaaagttacatgatgagcttactggccacatgttggacatgtattccgtaatgctaactaatgataacacctcacggtactgggaacctgagttttatgaggctatgtacacaccacatacagtcttgcaggctgtaggtgcttgtgtattgtgcaattcacagacttcacttcgttgcggtgcctgtattaggagaccattcctatgttgcaagtgctgctatgaccatgtcatttcaacatcacacaaattagtgttgtctgttaatccctatgtttgcaatgccccaggttgtgatgtcactgatgtgacacaactgtatctaggaggtatgagctattattgcaagtcacataagcctcccattagttttccattatgtgctaatggtcaggtttttggtttatacaaaaacacatgtgtaggcagtgacaatgtcactgacttcaatgcgatagcaacatgtgattggactaatgctggcgattacatacttgccaacacttgtactgagagactcaagcttttcgcagcagaaacgctcaaagccactgaggaaacatttaagctgtcatatggtattgccactgtacgcgaagtactctctgacagagaattgcatctttcatgggaggttggaaaacctagaccaccattgaacagaaactatgtctttactggttaccgtgtaactaaaaatagtaaagtacagattggagagtacacctttgaaaaaggtgactatggtgatgctgttgtgtacagaggtactacgacatacaagttgaatgttggtgattactttgtgttgacatctcacactgtaatgccacttagtgcacctactctagtgccacaagagcactatgtgagaattactggcttgtacccaacactcaacatctcagatgagttttctagcaatgttgcaaattatcaaaaggtcggcatgcaaaagtactctacactccaaggaccacctggtactggtaagagtcattttgccatcggacttgctctctattacccatctgctcgcatagtgtatacggcatgctctcatgcagctgttgatgccctatgtgaaaaggcattaaaatatttgcccatagataaatgtagtagaatcatacctgcgcgtgcgcgcgtagagtgttttgataaattcaaagtgaattcaacactagaacagtatgttttctgcactgtaaatgcattgccagaaacaactgctgacattgtagtctttgatgaaatctctatggctactaattatgacttgagtgttgtcaatgctagacttcgtgcaaaacactacgtctatattggcgatcctgctcaattaccagccccccgcacattgctgactaaaggcacactagaaccagaatattttaattcagtgtgcagacttatgaaaacaataggtccagacatgttccttggaacttgtcgccgttgtcctgctgaaattgttgacactgtgagtgctttagtttatgacaataagctaaaagcacacaaggataagtcagctcaatgcttcaaaatgttctacaaaggtgttattacacatgatgtttcatctgcaatcaacagacctcaaataggcgttgtaagagaatttcttacacgcaatcctgcttggagaaaagctgtttttatctcaccttataattcacagaacgctgtagcttcaaaaatcttaggattgcctacgcagactgttgattcatcacagggttctgaatatgactatgtcatattcacacaaactactgaaacagcacactcttgtaatgtcaaccgcttcaatgtggctatcacaagggcaaaaattggcattttgtgcataatgtctgatagagatctttatgacaaactgcaatttacaagtctagaaataccacgtcgcaatgtggctacattacaagcagaaaatgtaactggactttttaaggactgtagtaagatcattactggtcttcatcctacacaggcacctacacacctcagcgttgatataaagttcaagactgaaggattatgtgttgacataccaggcataccaaaggacatgacctaccgtagactcatctctatgatgggtttcaaaatgaattaccaagtcaatggttaccctaatatgtttatcacccgcgaagaagctattcgtcacgttcgtgcgtggattggctttgatgtagagggctgtcatgcaactagagatgctgtgggtactaacctacctctccagctaggattttctacaggtgttaacttagtagctgtaccgactggttatgttgacactgaaaataacacagaattcaccagagttaatgcaaaacctccaccaggtgaccagtttaaacatcttataccactcatgtataaaggcttgccctggaatgtagtgcgtattaagatagtacaaatgctcagtgatacactgaaaggattgtcagacagagtcgtgttcgtcctttgggcgcatggctttgagcttacatcaatgaagtactttgtcaagattggacctgaaagaacgtgttgtctgtgtgacaaacgtgcaacttgcttttctacttcatcagatacttatgcctgctggaatcattctgtgggttttgactatgtctataacccatttatgattgatgttcagcagtggggctttacgggtaaccttcagagtaaccatgaccaacattgccaggtacatggaaatgcacatgtggctagttgtgatgctatcatgactagatgtttagcagtccatgagtgctttgttaagcgcgttgattggtctgttgaataccctattataggagatgaactgagggttaattctgcttgcagaaaagtacaacacatggttgtgaagtctgcattgcttgctgataagtttccagttcttcatgacattggaaatccaaaggctatcaagtgtgtgcctcaggctgaagtagaatggaagttctacgatgctcagccatgtagtgacaaagcttacaaaatagaggaactcttctattcttatgctacacatcacgataaattcactgatggtgtttgtttgttttggaattgtaacgttgatcgttacccagccaatgcaattgtgtgtaggtttgacacaagagtcttgtcaaacttgaacttaccaggctgtgatggtggtagtttgtatgtgaataagcatgcattccacactccagctttcgataaaagtgcatttactaatttaaagcaattgcctttcttttactattctgatagtccttgtgagtctcatggcaaacaagtagtgtcggatattgattatgttccactcaaatctgctacgtgtattacacgatgcaatttaggtggtgctgtttgcagacaccatgcaaatgagtaccgacagtacttggatgcatataatatgatgatttctgctggatttagcctatggatttacaaacaatttgatacttataacctgtggaatacatttaccaggttacagagtttagaaaatgtggcttataatgttgttaataaaggacactttgatggacacgccggcgaagcacctgtttccatcattaataatgctgtttacacaaaggtagatggtattgatgtggagatctttgaaaataagacaacacttcctgttaatgttgcatttgagctttgggctaagcgtaacattaaaccagtgccagagattaagatactcaataatttgggtgttgatatcgctgctaatactgtaatctgggactacaaaagagaagccccagcacatgtatctacaataggtgtctgcacaatgactgacattgccaagaaacctactgagagtgcttgttcttcacttactgtcttgtttgatggtagagtggaaggacaggtagacctttttagaaacgcccgtaatggtgttttaataacagaaggttcagtcaaaggtctaacaccttcaaagggaccagcacaagctagcgtcaatggagtcacattaattggagaatcagtaaaaacacagtttaactactttaagaaagtagacggcattattcaacagttgcctgaaacctactttactcagagcagagacttagaggattttaagcccagatcacaaatggaaactgactttctcgagctcgctatggatgaattcatacagcgatataagctcgagggctatgccttcgaacacatcgtttatggagatttcagtcatggacaacttggcggtcttcatttaatgataggcttagccaagcgctcacaagattcaccacttaaattagaggattttatccctatggacagcacagtgaaaaattacttcataacagatgcgcaaacaggttcatcaaaatgtgtgtgttctgtgattgatcttttacttgatgactttgtcgagataataaagtcacaagatttgtcagtgatttcaaaagtggtcaaggttacaattgactatgctgaaatttcattcatgctttggtgtaaggatggacatgttgaaaccttctacccaaaactacaagcaagtcaagcgtggcaaccaggtgttgcgatgcctaacttgtacaagatgcaaagaatgcttcttgaaaagtgtgaccttcagaattatggtgaaaatgctgttataccaaaaggaataatgatgaatgtcgcaaagtatactcaactgtgtcaatacttaaatacacttactttagctgtaccctacaacatgagagttattcactttggtgctggctctgataaaggagttgcaccaggtacagctgtgctcagacaatggttgccaactggcacactacttgtcgattcagatcttaatgacttcgtctccgacgcagattctactttaattggagactgtgcaacagtacatacggctaataaatgggaccttattattagcgatatgtatgaccctaggaccaaacatgtgacaaaagagaatgactctaaagaagggtttttcacttatctgtgtggatttataaagcaaaaactagccctgggtggttctatagctgtaaagataacagagcattcttggaatgctgacctttacaagcttatgggccatttctcatggtggacagcttttgttacaaatgtaaatgcatcatcatcggaagcatttttaattggggctaactatcttggcaagccgaaggaacaaattgatggctataccatgcatgctaactacattttctggaggaacacaaatcctatccagttgtcttcctattcactctttgacatgagcaaatttcctcttaaattaagaggaactgctgtaatgtctcttaaggagaatcaaatcaatgatatgatttattctcttctggaaaaaggtaggcttatcattagagaaaacaacagagttgtggtttcaagtgatattcttgttaacaactaaacgaacatgtttattttcttattatttcttactctcactagtggtagtgaccttgaccggtgcaccacttttgatgatgttcaagctcctaattacactcaacatacttcatctatgaggggggtttactatcctgatgaaatttttagatcagacactctttatttaactcaggatttatttcttccattttattctaatgttacagggtttcatactattaatcatacgtttggcaaccctgtcataccttttaaggatggtatttattttgctgccacagagaaatcaaatgttgtccgtggttgggtttttggttctaccatgaacaacaagtcacagtcggtgattattattaacaattctactaatgttgttatacgagcatgtaactttgaattgtgtgacaaccctttctttgctgtttctaaacccatgggtacacagacacatactatgatattcgataatgcatttaattgcactttcgagtacatatctgatgccttttcgcttgatgtttcagaaaagtcaggtaattttaaacacttacgagagtttgtgtttaaaaataaagatgggtttctctatgtttataagggctatcaacctatagatgtagttcgtgatctaccttctggttttaacactttgaaacctatttttaagttgcctcttggtattaacattacaaattttagagccattcttacagccttttcacctgctcaagacatttggggcacgtcagctgcagcctattttgttggctatttaaagccaactacatttatgctcaagtatgatgaaaatggtacaatcacagatgctgttgattgttctcaaaatccacttgctgaactcaaatgctctgttaagagctttgagattgacaaaggaatttaccagacctctaatttcagggttgttccctcaggagatgttgtgagattccctaatattacaaacttgtgtccttttggagaggtttttaatgctactaaattcccttctgtctatgcatgggagagaaaaaaaatttctaattgtgttgctgattactctgtgctctacaactcaacatttttttcaacctttaagtgctatggcgtttctgccactaagttgaatgatctttgcttctccaatgtctatgcagattcttttgtagtcaagggagatgatgtaagacaaatagcgccaggacaaactggtgttattgctgattataattataaattgccagatgatttcatgggttgtgtccttgcttggaatactaggaacattgatgctacttcaactggtaattataattataaatataggtatcttagacatggcaagcttaggccctttgagagagacatatctaatgtgcctttctcccctgatggcaaaccttgcaccccacctgctcttaattgttattggccattaaatgattatggtttttacaccactactggcattggctaccaaccttacagagttgtagtactttcttttgaacttttaaatgcaccggccacggtttgtggaccaaaattatccactgaccttattaagaaccagtgtgtcaattttaattttaatggactcactggtactggtgtgttaactccttcttcaaagagatttcaaccatttcaacaatttggccgtgatgtttctgatttcactgattccgttcgagatcctaaaacatctgaaatattagacatttcaccttgctcttttgggggtgtaagtgtaattacacctggaacaaatgcttcatctgaagttgctgttctatatcaagatgttaactgcactgatgtttctacagcaattcatgcagatcaactcacaccagcttggcgcatatattctactggaaacaatgtattccagactcaagcaggctgtcttataggagctgagcatgtcgacacttcttatgagtgcgacattcctattggagctggcatttgtgctagttaccatacagtttctttattacgtagtactagccaaaaatctattgtggcttatactatgtctttaggtgctgatagttcaattgcttactctaataacaccattgctatacctactaacttttcaattagcattactacagaagtaatgcctgtttctatggctaaaacctccgtagattgtaatatgtacatctgcggagattctactgaatgtgctaatttgcttctccaatatggtagcttttgcacacaactaaatcgtgcactctcaggtattgctgctgaacaggatcgcaacacacgtgaagtgttcgctcaagtcaaacaaatgtacaaaaccccaactttgaaatattttggtggttttaatttttcacaaatattacctgaccctctaaagccaactaagaggtcttttattgaggacttgctctttaataaggtgacactcgctgatgctggcttcatgaagcaatatggcgaatgcctaggtgatattaatgctagagatctcatttgtgcgcagaagttcaatggacttacagtgttgccacctctgctcactgatgatatgattgctgcctacactgctgctctagttagtggtactgccactgctggatggacatttggtgctggcgctgctcttcaaataccttttgctatgcaaatggcatataggttcaatggcattggagttacccaaaatgttctctatgagaaccaaaaacaaatcgccaaccaatttaacaaggcgattagtcaaattcaagaatcacttacaacaacatcaactgcattgggcaagctgcaagacgttgttaaccagaatgctcaagcattaaacacacttgttaaacaacttagctctaattttggtgcaatttcaagtgtgctaaatgatatcctttcgcgacttgataaagtcgaggcggaggtacaaattgacaggttaattacaggcagacttcaaagccttcaaacctatgtaacacaacaactaatcagggctgctgaaatcagggcttctgctaatcttgctgctactaaaatgtctgagtgtgttcttggacaatcaaaaagagttgacttttgtggaaagggctaccaccttatgtccttcccacaagcagccccgcatggtgttgtcttcctacatgtcacgtatgtgccatcccaggagaggaacttcaccacagcgccagcaatttgtcatgaaggcaaagcatacttccctcgtgaaggtgtttttgtgtttaatggcacttcttggtttattacacagaggaacttcttttctccacaaataattactacagacaatacatttgtctcaggaaattgtgatgtcgttattggcatcattaacaacacagtttatgatcctctgcaacctgagcttgactcattcaaagaagagctggacaagtacttcaaaaatcatacatcaccagatgttgatcttggcgacatttcaggcattaacgcttctgtcgtcaacattcaaaaagaaattgaccgcctcaatgaggtcgctaaaaatttaaatgaatcactcattgaccttcaagaattgggaaaatatgagcaatatattaaatggccttggtatgtttggctcggcttcattgctggactaattgccatcgtcatggttacaatcttgctttgttgcatgactagttgttgcagttgcctcaagggtgcatgctcttgtggttcttgctgcaagtttgatgaggatgactctgagccagttctcaagggtgtcaaattacattacacataaacgaacttatggatttgtttatgagattttttactcttggatcaattactgcacagccagtaaaaattgacaatgcttctcctgcaagtactgttcatgctacagcaacgataccgctacaagcctcactccctttcggatggcttgttattggcgttgcatttcttgctgtttttcagagcgctaccaaaataattgcgctcaataaaagatggcagctagccctttataagggcttccagttcatttgcaatttactgctgctatttgttaccatctattcacatcttttgcttgtcgctgcaggtatggaggcgcaatttttgtacctctatgccttgatatattttctacaatgcatcaacgcatgtagaattattatgagatgttggctttgttggaagtgcaaatccaagaacccattactttatgatgccaactactttgtttgctggcacacacataactatgactactgtataccatataacagtgtcacagatacaattgtcgttactgaaggtgacggcatttcaacaccaaaactcaaagaagactaccaaattggtggttattctgaggataggcactcaggtgttaaagactatgtcgttgtacatggctatttcaccgaagtttactaccagcttgagtctacacaaattactacagacactggtattgaaaatgctacattcttcatctttaacaagcttgttaaagacccaccgaatgtgcaaatacacacaatcgacggctcttcaggagttgctaatccagcaatggatccaatttatgatgagccgacgacgactactagcgtgcctttgtaagcacaagaaagtgagtacgaacttatgtactcattcgtttcggaagaaacaggtacgttaatagttaatagcgtacttctttttcttgctttcgtggtattcttgctagtcacactagccatccttactgcgcttcgattgtgtgcgtactgctgcaatattgttaacgtgagtttagtaaaaccaacggtttacgtctactcgcgtgttaaaaatctgaactcttctgaaggagttcctgatcttctggtctaaacgaactaactattattattattctgtttggaactttaacattgcttatcatggcagacaacggtactattaccgttgaggagcttaaacaactcctggaacaatggaacctagtaataggtttcctattcctagcctggattatgttactacaatttgcctattctaatcggaacaggtttttgtacataataaagcttgttttcctctggctcttgtggccagtaacacttgcttgttttgtgcttgctgctgtctacagaattaattgggtgactggcgggattgcgattgcaatggcttgtattgtaggcttgatgtggcttagctacttcgttgcttccttcaggctgtttgctcgtacccgctcaatgtggtcattcaacccagaaacaaacattcttctcaatgtgcctctccgggggacaattgtgaccagaccgctcatggaaagtgaacttgtcattggtgctgtgatcattcgtggtcacttgcgaatggccggacactccctagggcgctgtgacattaaggacctgccaaaagagatcactgtggctacatcacgaacgctttcttattacaaattaggagcgtcgcagcgtgtaggcactgattcaggttttgctgcatacaaccgctaccgtattggaaactataaattaaatacagaccacgccggtagcaacgacaatattgctttgctagtacagtaagtgacaacagatgtttcatcttgttgacttccaggttacaatagcagagatattgattatcattatgaggactttcaggattgctatttggaatcttgacgttataataagttcaatagtgagacaattatttaagcctctaactaagaagaattattcggagttagatgatgaagaacctatggagttarattatccataaaacgaacatgaaaattattctcttcctgacattgattgtatttacatcttgcgagctatatcactatcaggagtgtgttagaggtacgactgtactactaaaagaaccttgcccatcaggaacatacgagggcaattcaccatttcaccctcttgctgacaataaatttgcactaacttgcactagcacacactttgcttttgcttgtgctgacggtactcgacatacctatcagctgcgtgcaagatcagtttcaccaaaacttttcatcagacaagaggaggttcaacaagagctctactcgccactttttctcattgttgctgctctagtatttttaatactttgcttcaccattaagagaaagacagaatgaatgagctcactttaattgacttctatttgtgctttttagcctttctgctattccttgttttaataatgcttattatattttggttttcactcgaaatccaggatctagaagaaccttgtaccaaagtctaaacgaacatgaaacttctcattgttttgacttgtatttctctatgcagttgcatatgcactgtagtacagcgctgtgcatctaataaacctcatgtgcttgaagatccttgtaaggtacaacactaggggtaatacttatagcactgcttggctttgtgctctaggaaaggttttaccttttcatagatggcacactatggttcaaacatgcacacctaatgttactatcaactgtcaagatccagctggtggtgcgcttatagctaggtgttggtaccttcatgaaggtcaccaaactgctgcatttagagacgtacttgttgttttaaataaacgaacaaattaaaatgtctgataatggaccccaatcaaaccaacgtagtgccccccgcattacatttggtggacccacagattcaactgacaataaccagaatggaggacgcaatggggcaaggccaaaacagcgccgaccccaaggtttacccaataatactgcgtcttggttcacagctctcactcagcatggcaaggaggaacttagattccctcgaggccagggcgttccaatcaacaccaatagtggtccagatgaccaaattggctactaccgaagagctacccgacgagttcgtggtggtgacggcaaaatgaaagagctcagccccagatggtacttctattacctaggaactggcccagaagcttcacttccctacggcgctaacaaagaaggcatcgtatgggttgcaactgagggagccttgaatacacccaaagaccacattggcacccgcaatcctaataacaatgctgccaccgtgctacaacttcctcaaggaacaacattgccaaaaggcttctacgcagagggaagcagaggcggcagtcaagcctcttctcgctcctcatcacgtagtcgcggtaattcaagaaattcaactcctggcagcagtaggggaaattctcctgctcgaatggctagcggaggtggtgaaactgccctcgcgctattgctgctagacagattgaaccagcttgagagcaaagtttctggtaaaggccaacaacaacaaggccaaactgtcactaagaaatctgctgctgaggcatctaaaaagcctcgccaaaaacgtactgccacaaaacagtacaacgtcactcaagcatttgggagacgtggtccagaacaaacccaaggaaatttcggggaccaagacctaatcagacaaggaactgattacaaacattggccgcaaattgcacaatttgctccaagtgcctctgcattctttggaatgtcacgcattggcatggaagtcacaccttcgggaacatggctgacttatcatggagccattaaattggatgacaaagatccacaattcaaagacaacgtcatactgctgaacaagcacattgacgcatacaaaacattcccaccaacagagcctaaaaaggacaaaaagaaaaagactgatgaagctcagcctttgccgcagagacaaaagaagcagcccactgtgactcttcttcctgcggctgacatggatgatttctccagacaacttcaaaattccatgagtggagcttctgctgattcaactcaggcataaacactcatgatgaccacacaaggcagatgggctatgtaaacgttttcgcaattccgtttacgatacatagtctactcttgtgcagaatgaattctcgtaactaaacagcacaagtaggtttagttaactttaatctcacatagcaatctttaatcaatgtgtaacattagggaggacttgaaagagccaccacattttcatcgaggccacgcggagtacgatcgagggtacagtgaataatgctagggagagctgcctatatggaagagccctaatgtgtaaaattaattttagtagtgctatccccatgtgattttaatagcttcttaggagaatgacaaaaaaaaaaaaaaaaaaaaaaaa

SEQ ID NO: 64 - DNA, 10546 bp, Coronavirus
agtgttttattagcacttcaacagcttgaagtcaaattcaatgcaccagcacttcaagaggcttattatagagcccgtgctggtgatgctgctaacttttgtgcactcatactcgcttacagtaataaaactgttggcgagcttggtgatgtcagagaaactatgacccatcttctacagcatgctaatttggaatctgcaaagcgagttcttaatgtggtgtgtaaacattgtggtcagaaaactactaccttaacgggtgtagaagctgtgatgtatatgggtactctatcttatgataatcttaagacaggtgtttccattccatgtgtgtgtggtcgtgatgctacacaatatctagtacaacaagagtcttcttttgttatgatgtctgcaccacctgctgagtataaattacagcaaggtacattcttatgtgcgaatgagtacactggtaactatcagtgtggtcattacactcatataactgctaaggagaccctctatcgtattgacggagctcaccttacaaagatgtcagagtacaaaggaccagtgactgatgttttctacaaggaaacatcttacactacaaccatcaagcctgtgtcgtataaactcgatggagttacttacacagagattgaaccaaaattggatgggtattataaaaaggataatgcttactatacagagcagcctatagaccttgtaccaactcaaccattaccaaatgcgagttttgataatttcaaactcacatgttctaacacaaaatttgctgatgatttaaatcaaatgacaggcttcacaaagccagcttcacgagagctatctgtcacattcttcccagacttgaatggcgatgtagtggctattgactatagacactattcagcgagtttcaagaaaggtgctaaattactgcataagccaattgtttggcacattaaccaggctacaaccaagacaacgttcaaaccaaacacttggtgtttacgttgtctttggagtacaaagccagtagatacttcaaattcatttgaagttctggcagtagaagacacacaaggaatggacaatcttgcttgtgaaagtcaacaacccacctctgaagaagtagtggaaaatcctaccatacagaaggaagtcatagagtgtgacgtgaaaactaccgaagttgtaggcaatgtcatacttaaaccatcagatgaaggtgttaaagtaacacaagagttaggtcatgaggatcttatggctgcttatgtggaaaacacaagcattaccattaagaaacctaatgagctttcactagccttaggtttaaaaacaattgccactcatggtattgctgcaattaatagtgttccttggagtaaaattttggcttatgtcaaaccattcttaggacaagcagcaattacaacatcaaattgcgctaagagattagcacaacgtgtgtttaacaattatatgccttatgtgtttacattattgttccaattgtgtacttttactaaaagtaccaattctagaattagagcttcactacctacaactattgctaaaaatagtgttaagagtgttgctaaattatgtttggatgccggcattaattatgtgaagtcacccaaattttctaaattgttcacaatcgctatgtggctattgttgttaagtatttgcttaggttctctaatctgtgtaactgctgcttttggtgtactcttatctaattttggtgctccttcttattgtaatggcgttagagaattgtatcttaattcgtctaacgttactactatggatttctgtgaaggttcttttccttgcagcatttgtttaagtggattagactcccttgattcttatccagctcttgaaaccattcaggtgacgatttcatcgtacaagctagacttgacaattttaggtctggccgctgagtgggttttggcatatatgttgttcacaaaattcttttatttattaggtctttcagctataatgcaggtgttctttggctattttgctagtcatttcatcagcaattcttggctcatgtggtttatcattagtattgtacaaatggcacccgtttctgcaatggttaggatgtacatcttctttgcttctttctactacatatggaagagctatgttcatatcatggatggttgcacctcttcgacttgcatgatgtgctataagcgcaatcgtgccacacgcgttgagtgtacaactattgttaatggcatgaagagatctttctatgtctatgcaaatggaggccgtggcttctgcaagactcacaattggaattgtctcaattgtgacacattttgcactggtagtacattcattagtgatgaagttgctcgtgatttgtcactccagtttaaaagaccaatcaaccctactgaccagtcatcgtatattgttgatagtgttgctgtgaaaaatggcgcgcttcacctctactttgacaaggctggtcaaaagacctatgagagacatccgctctcccattttgtcaatttagacaatttgagagctaacaacactaaaggttcactgcctattaatgtcatagtttttgatggcaagtccaaatgcgacgagtctgcttctaagtctgcttctgtgtactacagtcagctgatgtgccaacctattctgttgcttgaccaagctcttgtatcagacgttggagatagtactgaagtttccgttaagatgtttgatgcttatgtcgacaccttttcagcaacttttagtgttcctatggaaaaacttaaggcacttgttgctacagctcacagcgagttagcaaagggtgtagctttagatggtgtcctttctacattcgtgtcagctgcccgacaaggtgttgttgataccgatgttgacacaaaggatgttattgaatgtctcaaactttcacatcactctgacttagaagtgacaggtgacagttgtaacaatttcatgctcacctataataaggttgaaaacatgacgcccagagatcttggcgcatgtattgactgtaatgcaaggcatatcaatgcccaagtagcaaaaagtcacaatgtttcactcatctggaatgtaaaagactacatgtctttatctgaacagctgcgtaaacaaattcgtagtgctgccaagaagaacaacataccttttagactaacttgtgctacaactagacaggttgtcaatgtcataactactaaaatctcactcaagggtggtaagattgttagtacttgttttaaacttatgcttaaggccacattattgtgcgttcttgctgcattggtttgttatatcgttatgccagtacatacattgtcaatccatgatggttacacaaatgaaatcattggttacaaagccattcaggatggtgtcactcgtgacatcatttctactgatgattgttttgcaaataaacatgctggttttgacgcatggtttagccagcgtggtggttcatacaaaaatgacaaaagctgccctgtagtagctgctatcattacaagagagattggtttcatagtgcctggcttaccgggtactgtgctgagagcaatcaatggtgacttcttgcattttctacctcgtgtttttagtgctgttggcaacatttgctacacaccttccaaactcattgagtatagtgattttgctacctctgcttgcgttcttgctgctgagtgtacaatttttaaggatgctatgggcaaacctgtgccatattgttatgacactaatttgctagagggttctatttcttatagtgagcttcgtccagacactcgttatgtgcttatggatggttccatcatacagtttcctaacacttacctggagggttctgttagagtagtaacaacttttgatgctgagtactgtagacatggtacatgcgaaaggtcagaagtaggtatttgcctatctaccagtggtagatgggttcttaataatgagcattacagagctctatcaggagttttctgtggtgttgatgcgatgaatctcatagctaacatctttactcctcttgtgcaacctgtgggtgctttagatgtgtctgcttcagtagtggctggtggtattattgccatattggtgacttgtgctgcctactactttatgaaattcagacgtgtttttggtgagtacaaccatgttgttgctgctaatgcacttttgtttttgatgtctttcactatactctgtctggtaccagcttacagctttctgccgggagtctactcagtcttttacttgtacttgacattctatttcaccaatgatgtttcattcttggctcaccttcaatggtttgccatgttttctcctattgtgcctttttggataacagcaatctatgtattctgtatttctctgaagcactgccattggttctttaacaactatcttaggaaaagagtcatgtttaatggagttacatttagtaccttcgaggaggctgctttgtgtacctttttgctcaacaaggaaatgtacctaaaattgcgtagcgagacactgttgccacttacacagtataacaggtatcttgctctatataacaagtacaagtatttcagtggagccttagatactaccagctatcgtgaagcagcttgctgccacttagcaaaggctctaaatgactttagcaactcaggtgctgatgttctctaccaaccaccacagacatcaatcacttctgctgttctgcagagtggttttaggaaaatggcattcccgtcaggcaaagttgaagggtgcatggtacaagtaacctgtggaactacaactcttaatggattgtggttggatgacacagtatactgtccaagacatgtcatttgcacagcagaagacatgcttaatcctaactatgaagatctgctcattcgcaaatccaaccatagctttcttgttcaggctggcaatgttcaacttcgtgttattggccattctatgcaaaattgtctgcttaggcttaaagttgatacttctaaccctaagacacccaagtataaatttgtccgtatccaacctggtcaaacattttcagttctagcatgctacaatggttcaccatctggtgtttatcagtgtgccatgagacctaatcataccattaaaggttctttccttaatggatcatgtggtagtgttggttttaacattgattatgattgcgtgtctttctgctatatgcatcatatggagcttccaacaggagtacacgctggtaccgacttagaaggtaaattctatggtccatttgttgacagacaaactgcacaggctgcaggtacagacacaaccataacattaaatgttttggcatggctgtatgctgctgttatcaatggtgataggtggtttcttaatagattcaccactactttgaatgactttaaccttgtggcaatgaagtacaactatgaacctttgacacaagatcatgttgacatattgggacctctttctgctcaaacaggaattgccgtcttagatatgtgtgctgctttgaaagagctgctgcagaatggtatgaatggtcgtactatccttggtagcactattttagaagatgagtttacaccatttgatgttgttagacaatgctctggtgttaccttccaaggtaagttcaagaaaattgttaagggcactcatcattggatgcttttaactttcttgacatcactattgattcttgttcaaagtacacagtggtcactgtttttctttgtttacgagaatgctttcttgccatttactcttggtattatggcaattgctgcatgtgctatgctgcttgttaagcataagcacgcattcttgtgcttgtttctgttaccttctcttgcaacagttgcttactttaatatggtctacatgcctgctagctgggtgatgcgtatcatgacatggcttgaattggctgacactagcttgtctggttataggcttaaggattgtgttatgtatgcttcagctttagttttgcttattctcatgacagctcgcactgtttatgatgatgctgctagacgtgtttggacactgatgaatgtcattacacttgtttacaaagtctactatggtaatgctttagatcaagctatttccatgtgggccttagttatttctgtaacctctaactattctggtgtcgttacgactatcatgtttttagctagagctatagtgtttgtgtgtgttgagtattatccattgttatttattactggcaacaccttacagtgtatcatgcttgtttattgtttcttaggctattgttgctgctgctactttggccttttctgtttactcaaccgttacttcaggcttactcttggtgtttatgactacttggtctctacacaagaatttaggtatatgaactcccaggggcttttgcctcctaagagtagtattgatgctttcaagcttaacattaagttgttgggtattggaggtaaaccatgtatcaaggttgctactgtacagtctaaaatgtctgacgtaaagtgcacatctgtggtactgctctcggttcttcaacaacttagagtagagtcatcttctaaattgtgggcacaatgtgtacaactccacaatgatattcttcttgcaaaagacacaactgaagctttcgagaagatggtttctcttttgtctgttttgctatccatgcagggtgctgtagacattaataggttgtgcgaggaaatgctcgataaccgtgctactcttcaggctattgcttcagaatttagttctttaccatcatatgccgcttatgccactgcccaggaggcctatgagcaggctgtagctaatggtgattctgaagtcgttctcaaaaagttaaagaaatctttgaatgtggctaaatctgagtttgaccgtgatgctgccatgcaacgcaagttggaaaagatggcagatcaggctatgacccaaatgtacaaacaggcaagatctgaggacaagagggcccaagtcgcttctgctatgcaaacaatgctcttcactatgctaaggaagcttgataatgatgcacttaacaacattatcaacaatgcgcgtgatggttgtgttccactcaacatcataccattgactacagcagccaaactcatggttgttgtccctgattatggtacctacaagaacacttgtgatggtaacacctttacatatgcatctgcactctgggaaatccagcaagttgttgatgcggatagcaagattgttcaacttagtgaaattaacatggacaattcaccaaatttggcttggcctcttattgttacagctctaagagccaactcagctgttaaactacagaataatgaactgagtccagtagcactacgacagatgtcctgtgcggctggtaccacacaaacagcttgtactgatgacaatgcacttgcctactataacaattcgaagggaggtaggtttgtgctggcattactatcagaccaccaagatctcaaatgggctagattccctaagagtgatggtacaggtacaatttacacagaactggaaccaccttgtaggtttgttacagacacaccaaaagggcctaaagtgaaatacttgtacttcatcaaaggcttaaacaacctaaatagaggtatggtgctgggcagtttagctgctacagtacgtcttcaggctggaaatgctacagaagtacctgccaattcaactgtgctttccttctgtgcttttgcagtagaccctgctaaagcatataaggattacctagcaagtggaggacaaccaatcaccaactgtgtgaagatgttgtgtacacacactggtacaggacaggcaattactgtaacaccagaagctaacatggaccaagagtcctttggtggtgcttcatgttgtctgtattgtagatgccacattgaccatccaaatcctaaaggattctgtgacttgaaaggtaagtacgtccaaatacctaccacttgtgctaatgacccagtgggttttacacttagaaacacagtctgtaccgtctgcggaatgtggaaaggttatggctgtagttgtgaccaactccgcgaacccttgatgcagtctgcggatgcatcaacgtttttaaacgggtttgcggtgtaagtgcagcccgtcttacaccgtgcggcacaggcactagtactgatgtcgtctacagggcttttgatatttacaacgaaaaagttgctggttttgcaaagttcctaaaaactaattgctgtcgcttccaggagaaggatgaggaaggcaatttattagactcttactttgtagttaagaggcatactatgtctaactaccaacatgaagagactatttataacttggttaaagattgtccagcggttgctgtccatgactttttcaagtttagagtagatggtgacatggtaccacatatatcacgtcagcgtctaactaaatacacaatggctgatttagtctatgctctacgtcattttgatgagggtaattgtgatacattaaaagaaatactcgtcacatacaattgctgtgatgatgattatttcaataagaaggattggtatgacttcgtagagaatcctgacatcttacgcgtatatgctaacttaggtgagcgtgtacgccaatcattattaaagactgtacaattctgcgatgctatgcgtgatgcaggcattgtaggcgtactgacattagataatcaggatcttaatgggaactggtacgatttcggtgatttcgtacaagtagcaccaggctgcggagttcctattgtggattcatattactcattgctgatgcccatcctcactttgactagggcattggctgctgagtcccatatggatgctgatctcgcaaaaccacttattaagtgggatttgctgaaatatgattttacggaagagagactttgtctcttcgaccgttattttaaatattgggaccagacataccatcccaattgtattaactgtttggatgataggtgtatccttcattgtgcaaactttaatgtgttattttctactgtgtttccacctacaagttttggaccactagtaagaaaaatatttgtagatggtgttccttttgttgtttcaactggataccattttcgtgagttaggagtcgtacataatcaggatgtaaacttacatagctcgcgtctcagtttcaaggaacttttagtgtatgctgctgatccagctatgcatgcagcttctggcaatttattgctagataaacgcactacatgcttttcagtagctgcactaacaaacaatgttgcttttcaaactgtcaaacccggtaattttaataaagacttttatgactttgctgtgtctaaaggtttctttaaggaaggaagttctgttgaactaaaacacttcttctttgctcaggatggcaacgctgctatcagtgattatgactattatcgttataatctgccaacaatgtgtgatatcagacaactcctattcgtagttgaagttgttgataaatactttgattgttacgatggtggctgtattaatgccaaccaagtaatcgttaacaatctggataaatcagctggtttcccatttaataaatggggtaaggctagactttattatgactcaatgagttatgaggatcaagatgcacttttcgcgtatactaagcgtaatgtcatccctactataactcaaatgaatcttaagtatgccattagtgcaaagaatagagctcgcaccgtagctggtgtctctatctgtagtactatgacaaatagacagtttcatcagaaattattgaagtcaatagccgccactagaggagctactgtggtaattggaacaagcaagttttacggtggctggcataatatgttaaaaactgtttacagtgatgtagaaactccacaccttatgggttgggattatccaaaatgtgacagagccatgcctaacatgcttaggataatggcctctcttgttcttgctcgcaaacataacacttgctgtaacttatcacaccgtttctacaggttagctaacgagtgtgcgcaagtattaagtgagatggtcatgtgtggcggctcactatatgttaaaccaggtggaacatcatccggtgatgctacaactgcttatgctaatagtgtctttaacatttgtcaagctgttacagccaatgtaaatgcacttctttcaactgatggtaataagatagctgacaagtatgtccgcaatctacaacacaggctctatgagtgtctctatagaaatagggatgttgatcatgaattcgtggatgagttttacgcttacctgcgtaaacatttctccatgatgattctttctgatgatgccgttgtgtgctataacagtaactatgcggctcaaggtttagtagctagcattaagaactttaaggcagttctttattatcaaaataatgtgttcatgtctgaggcaaaatgttggac

SEQ ID NO: 65 - DNA, 29711 bp, Coronavirus
tacccaggaaaagccaaccaacctcgatctcttgtagatctgttctctaaacgaactttaaaatctgtgtagctgtcgctcggctgcatgcctagtgcacctacgcagtataaacaataataaattttactgtcgttgacaagaaacgagtaactcgtccctcttctgcagactgcttacggtttcgtccgtgttgcagtcgatcatcagcatacctaggtttcgtccgggtgtgaccgaaaggtaagatggagagccttgttcttggtgtcaacgagaaaacacacgtccaactcagtttgcctgtccttcaggttagagacgtgctagtgcgtggcttcggggactctgtggaagaggccctatcggaggcacgtgaacacctcaaaaatggcacttgtggtctagtagagctggaaaaaggcgtactgccccagcttgaacagccctatgtgttcattaaacgttctgatgccttaagcaccaatcacggccacaaggtcgttgagctggttgcagaaatggacggcattcagtacggtcgtagcggtataacactgggagtactcgtgccacatgtgggcgaaaccccaattgcataccgcaatgttcttcttcgtaagaacggtaataagggagccggtggtcatagctatggcatcgatctaaagtcttatgacttaggtgacgagcttggcactgatcccattgaagattatgaacaaaactggaacactaagcatggcagtggtgcactccgtgaactcactcgtgagctcaatggaggtgcagtcactcgctatgtcgacaacaatttctgtggcccagatgggtaccctcttgattgcatcaaagattttctcgcacgcgcgggcaagtcaatgtgcactctttccgaacaacttgattacatcgagtcgaagagaggtgtctactgctgccgtgaccatgagcatgaaattgcctggttcactgagcgctctgataagagctacgagcaccagacacccttcgaaattaagagtgccaagaaatttgacactttcaaaggggaatgcccaaagtttgtgtttcctcttaactcaaaagtcaaagtcattcaaccacgtgttgaaaagaaaaagactgagggtttcatggggcgtatacgctctgtgtaccctgttgcatctccacaggagtgtaacaatatgcacttgtctaccttgatgaaatgtaatcattgcgatgaagtttcatggcagacgtgcgactttctgaaagccacttgtgaacattgtggcactgaaaatttagttattgaaggacctactacatgtgggtacctacctactaatgctgtagtgaaaatgccatgtcctgcctgtcaagacccagagattggacctgagcatagtgttgcagattatcacaaccactcaaacattgaaactcgactccgcaagggaggtaggactagatgttttggaggctgtgtgtttgcctatgttggctgctataataagcgtgcctactgggttcctcgtgctagtgctgatattggctcaggccatactggcattactggtgacaatgtggagaccttgaatgaggatctccttgagatactgagtcgtgaacgtgttaacattaacattgttggcgattttcatttgaatgaagaggttgccatcattttggcatctttctctgcttctacaagtgcctttattgacactataaagagtcttgattacaagtctttcaaaaccattgttgagtcctgcggtaactataaagttaccaagggaaagcccgtaaaaggtgcttggaacattggacaacagagatcagttttaacaccactgtgtggttttccctcacaggctgctggtgttatcagatcaatttttgcgcgcacacttgatgcagcaaaccactcaattcctgatttgcaaagagcagctgtcaccatacttgatggtatttctgaacagtcattacgtcttgtcgacgccatggtttatacttcagacctgctcaccaacagtgtcattattatggcatatgtaactggtggtcttgtacaacagacttctcagtggttgtctaatcttttgggcactactgttgaaaaactcaggcctatctttgaatggattgaggcgaaacttagtgcaggagttgaatttctcaaggatgcttgggagattctcaaatttctcattacaggtgtttttgacatcgtcaagggtcaaatacaggttgcttcagataacatcaaggattgtgtaaaatgcttcattgatgttgttaacaaggcactcgaaatgtgcattgatcaagtcactatcgctggcgcaaagttgcgatcactcaacttaggtgaagtcttcatcgctcaaagcaagggactttaccgtcagtgtatacgtggcaaggagcagctgcaactactcatgcctcttaaggcaccaaaagaagtaacctttcttgaaggtgattcacatgacacagtacttacctctgaggaggttgttctcaagaacggtgaactcgaagcactcgagacgcccgttgatagcttcacaaatggagctatcgttggcacaccagtctgtgtaaatggcctcatgctcttagagattaaggacaaagaacaatactgcgcattgtctcctggtttactggctacaaacaatgtctttcgcttaaaagggggtgcaccaattaaaggtgtaacctttggagaagatactgtttgggaagttcaaggttacaagaatgtgagaatcacatttgagcttgatgaacgtgttgacaaagtgcttaatgaaaagtgctctgtctacactgttgaatccggtaccgaagttactgagtttgcatgtgttgtagcagaggctgttgtgaagactttacaaccagtttctgatctccttaccaacatgggtattgatcttgatgagtggagtgtagctacattctacttatttgatgatgctggtgaagaaaacttttcatcacgtatgtattgttccttttaccctccagatgaggaagaagaggacgatgcagagtgtgaggaagaagaaattgatgaaacctgtgaacatgagtacggtacagaggatgattatcaaggtctccctctggaatttggtgcctcagctgaaacagttcgagttgaggaagaagaagaggaagactggctggatgatactactgagcaatcagagattgagccagaaccagaacctacacctgaagaaccagttaatcagtttactggttatttaaaacttactgacaatgttgccattaaatgtgttgacatcgttaaggaggcacaaagtgctaatcctatggtgattgtaaatgctgctaacatacacctgaaacatggtggtggtgtagcaggtgcactcaacaaggcaaccaatggtgccatgcaaaaggagagtgatgattacattaagctaaatggccctcttacagtaggagggtcttgtttgctttctggacataatcttgctaagaagtgtctgcatgttgttggacctaacctaaatgcaggtgaggacatccagcttcttaaggcagcatatgaaaatttcaattcacaggacatcttacttgcaccattgttgtcagcaggcatatttggtgctaaaccacttcagtctttacaagtgtgcgtgcagacggttcgtacacaggtttatattgcagtcaatgacaaagctctttatgagcaggttgtcatggattatcttgataacctgaagcctagagtggaagcacctaaacaagaggagccaccaaacacagaagattccaaaactgaggagaaatctgtcgtacagaagcctgtcgatgtgaagccaaaaattaaggcctgcattgatgaggttaccacaacactggaagaaactaagtttcttaccaataagttactcttgtttgctgatatcaatggtaagctttaccatgattctcagaacatgcttagaggtgaagatatgtctttccttgagaaggatgcaccttacatggtaggtgatgttatcactagtggtgatatcacttgtgttgtaataccctccaaaaaggctggtggcactactgagatgctctcaagagctttgaagaaagtgccagttgatgagtatataaccacgtaccctggacaaggatgtgctggttatacacttgaggaagctaagactgctcttaagaaatgcaaatctgcattttatgtactaccttcagaagcacctaatgctaaggaagagattctaggaactgtatcctggaatttgagagaaatgcttgctcatgctgaagagacaagaaaattaatgcctatatgcatggatgttagagccataatggcaaccatccaacgtaagtataaaggaattaaaattcaagagggcatcgttgactatggtgtccgattcttcttttatactagtaaagagcctgtagcttctattattacgaagctgaactctctaaatgagccgcttgtcacaatgccaattggttatgtgacacatggttttaatcttgaagaggctgcgcgctgtatgcgttctcttaaagctcctgccgtagtgtcagtatcatcaccagatgctgttactacatataatggatacctcacttcgtcatcaaagacatctgaggagcactttgtagaaacagtttctttggctggctcttacagagattggtcctattcaggacagcgtacagagttaggtgttgaatttcttaagcgtggtgacaaaattgtgtaccacactctggagagccccgtcgagtttcatcttgacggtgaggttctttcacttgacaaactaaagagtctcttatccctgcgggaggttaagactataaaagtgttcacaactgtggacaacactaatctccacacacagcttgtggatatgtctatgacatatggacagcagtttggtccaacatacttggatggtgctgatgttacaaaaattaaacctcatgtaaatcatgagggtaagactttctttgtactacctagtgatgacacactacgtagtgaagctttcgagtactaccatactcttgatgagagttttcttggtaggtacatgtctgctttaaaccacacaaagaaatggaaatttcctcaagttggtggtttaacttcaattaaatgggctgataacaattgttatttgtctagtgttttattagcacttcaacagcttgaagtcaaattcaatgcaccagcacttcaagaggcttattatagagcccgtgctggtgatgctgctaacttttgtgcactcatactcgcttacagtaataaaactgttggcgagcttggtgatgtcagagaaactatgacccatcttctacagcatgctaatttggaatctgcaaagcgagttcttaatgtggtgtgtaaacattgtggtcagaaaactactaccttaacgggtgtagaagctgtgatgtatatgggtactctatcttatgataatcttaagacaggtgtttccattccatgtgtgtgtggtcgtgatgctacacaatatctagtacaacaagagtcttcttttgttatgatgtctgcaccacctgctgagtataaattacagcaaggtacattcttatgtgcgaatgagtacactggtaactatcagtgtggtcattacactcatataactgctaaggagaccctctatcgtattgacggagctcaccttacaaagatgtcagagtacaaaggaccagtgactgatgttttctacaaggaaacatcttacactacaaccatcaagcctgtgtcgtataaactcgatggagttacttacacagagattgaaccaaaattggatgggtattataaaaaggataatgcttactatacagagcagcctatagaccttgtaccaactcaaccattaccaaatgcgagttttgataatttcaaactcacatgttctaacacaaaatttgctgatgatttaaatcaaatgacaggcttcacaaagccagcttcacgagagctatctgtcacattcttcccagacttgaatggcgatgtagtggctattgactatagacactattcagcgagtttcaagaaaggtgctaaattactgcataagccaattgtttggcacattaaccaggctacaaccaagacaacgttcaaaccaaacacttggtgtttacgttgtctttggagtacaaagccagtagatacttcaaattcatttgaagttctggcagtagaagacacacaaggaatggacaatcttgcttgtgaaagtcaacaacccacctctgaagaagtagtggaaaatcctaccatacagaaggaagtcatagagtgtgacgtgaaaactaccgaagttgtaggcaatgtcatacttaaaccatcagatgaaggtgttaaagtaacacaagagttaggtcatgaggatcttatggctgcttatgtggaaaacacaagcattaccattaagaaacctaatgagctttcactagccttaggtttaaaaacaattgccactcatggtattgctgcaattaatagtgttccttggagtaaaattttggcttatgtcaaaccattcttaggacaagcagcaattacaacatcaaattgcgctaagagattagcacaacgtgtgtttaacaattatatgccttatgtgtttacattattgttccaattgtgtacttttactaaaagtaccaattctagaattagagcttcactacctacaactattgctaaaaatagtgttaagagtgttgctaaattatgtttggatgccggcattaattatgtgaagtcacccaaattttctaaattgttcacaatcgctatgtggctattgttgttaagtatttgcttaggttctctaatctgtgtaactgctgcttttggtgtactcttatctaattttggtgctccttcttattgtaatggcgttagagaattgtatcttaattcgtctaacgttactactatggatttctgtgaaggttcttttccttgcagcatttgtttaagtggattagactcccttgattcttatccagctcttgaaaccattcaggtgacgatttcatcgtacaagctagacttgacaattttaggtctggccgctgagtgggttttggcatatatgttgttcacaaaattcttttatttattaggtctttcagctataatgcaggtgttctttggctattttgctagtcatttcatcagcaattcttggctcatgtggtttatcattagtattgtacaaatggcacccgtttctgcaatggttaggatgtacatcttctttgcttctttctactacatatggaagagctatgttcatatcatggatggttgcacctcttcgacttgcatgatgtgctataagcgcaatcgtgccacacgcgttgagtgtacaactattgttaatggcatgaagagatctttctatgtctatgcaaatggaggccgtggcttctgcaagactcacaattggaattgtctcaattgtgacacattttgcactggtagtacattcattagtgatgaagttgctcgtgatttgtcactccagtttaaaagaccaatcaaccctactgaccagtcatcgtatattgttgatagtgttgctgtgaaaaatggcgcgcttcacctctactttgacaaggctggtcaaaagacctatgagagacatccgctctcccattttgtcaatttagacaatttgagagctaacaacactaaaggttcactgcctattaatgtcatagtttttgatggcaagtccaaatgcgacgagtctgcttctaagtctgcttctgtgtactacagtcagctgatgtgccaacctattctgttgcttgaccaagctcttgtatcagacgttggagatagtactgaagtttccgttaagatgtttgatgcttatgtcgacaccttttcagcaacttttagtgttcctatggaaaaacttaaggcacttgttgctacagctcacagcgagttagcaaagggtgtagctttagatggtgtcctttctacattcgtgtcagctgcccgacaaggtgttgttgataccgatgttgacacaaaggatgttattgaatgtctcaaactttcacatcactctgacttagaagtgacaggtgacagttgtaacaatttcatgctcacctataataaggttgaaaacatgacgcccagagatcttggcgcatgtattgactgtaatgcaaggcatatcaatgcccaagtagcaaaaagtcacaatgtttcactcatctggaatgtaaaagactacatgtctttatctgaacagctgcgtaaacaaattcgtagtgctgccaagaagaacaacataccttttagactaacttgtgctacaactagacaggttgtcaatgtcataactactaaaatctcactcaagggtggtaagattgttagtacttgttttaaacttatgcttaaggccacattattgtgcgttcttgctgcattggtttgttatatcgttatgccagtacatacattgtcaatccatgatggttacacaaatgaaatcattggttacaaagccattcaggatggtgtcactcgtgacatcatttctactgatgattgttttgcaaataaacatgctggttttgacgcatggtttagccagcgtggtggttcatacaaaaatgacaaaagctgccctgtagtagctgctatcattacaagagagattggtttcatagtgcctggcttaccgggtactgtgctgagagcaatcaatggtgacttcttgcattttctacctcgtgtttttagtgctgttggcaacatttgctacacaccttccaaactcattgagtatagtgattttgctacctctgcttgcgttcttgctgctgagtgtacaatttttaaggatgctatgggcaaacctgtgccatattgttatgacactaatttgctagagggttctatttcttatagtgagcttcgtccagacactcgttatgtgcttatggatggttccatcatacagtttcctaacacttacctggagggttctgttagagtagtaacaacttttgatgctgagtactgtagacatggtacatgcgaaaggtcagaagtaggtatttgcctatctaccagtggtagatgggttcttaataatgagcattacagagctctatcaggagttttctgtggtgttgatgcgatgaatctcatagctaacatctttactcctcttgtgcaacctgtgggtgctttagatgtgtctgcttcagtagtggctggtggtattattgccatattggtgacttgtgctgcctactactttatgaaattcagacgtgtttttggtgagtacaaccatgttgttgctgctaatgcacttttgtttttgatgtctttcactatactctgtctggtaccagcttacagctttctgccgggagtctactcagtcttttacttgtacttgacattctatttcaccaatgatgtttcattcttggctcaccttcaatggtttgccatgttttctcctattgtgcctttttggataacagcaatctatgtattctgtatttctctgaagcactgccattggttctttaacaactatcttaggaaaagagtcatgtttaatggagttacatttagtaccttcgaggaggctgctttgtgtacctttttgctcaacaaggaaatgtacctaaaattgcgtagcgagacactgttgccacttacacagtataacaggtatcttgctctatataacaagtacaagtatttcagtggagccttagatactaccagctatcgtgaagcagcttgctgccacttagcaaaggctctaaatgactttagcaactcaggtgctgatgttctctaccaaccaccacagacatcaatcacttctgctgttctgcagagtggttttaggaaaatggcattcccgtcaggcaaagttgaagggtgcatggtacaagtaacctgtggaactacaactcttaatggattgtggttggatgacacagtatactgtccaagacatgtcatttgcacagcagaagacatgcttaatcctaactatgaagatctgctcattcgcaaatccaaccatagctttcttgttcaggctggcaatgttcaacttcgtgttattggccattctatgcaaaattgtctgcttaggcttaaagttgatacttctaaccctaagacacccaagtataaatttgtccgtatccaacctggtcaaacattttcagttctagcatgctacaatggttcaccatctggtgtttatcagtgtgccatgagacctaatcataccattaaaggttctttccttaatggatcatgtggtagtgttggttttaacattgattatgattgcgtgtctttctgctatatgcatcatatggagcttccaacaggagtacacgctggtactgacttagaaggtaaattctatggtccatttgttgacagacaaactgcacaggctgcaggtacagacacaaccataacattaaatgttttggcatggctgtatgctgctgttatcaatggtgataggtggtttcttaatagattcaccactactttgaatgactttaaccttgtggcaatgaagtacaactatgaacctttgacacaagatcatgttgacatattgggacctctttctgctcaaacaggaattgccgtcttagatatgtgtgctgctttgaaagagctgctgcagaatggtatgaatggtcgtactatccttggtagcactattttagaagatgagtttacaccatttgatgttgttagacaatgctctggtgttaccttccaaggtaagttcaagaaaattgttaagggcactcatcattggatgcttttaactttcttgacatcactattgattcttgttcaaagtacacagtggtcactgtttttctttgtttacgagaatgctttcttgccatttactcttggtattatggcaattgctgcatgtgctatgctgcttgttaagcataagcacgcattcttgtgcttgtttctgttaccttctcttgcaacagttgcttactttaatatggtctacatgcctgctagctgggtgatgcgtatcatgacatggcttgaattggctgacactagcttgtctggttataggcttaaggattgtgttatgtatgcttcagctttagttttgcttattctcatgacagctcgcactgtttatgatgatgctgctagacgtgtttggacactgatgaatgtcattacacttgtttacaaagtctactatggtaatgctttagatcaagctatttccatgtgggccttagttatttctgtaacctctaactattctggtgtcgttacgactatcatgtttttagctagagctatagtgtttgtgtgtgttgagtattacccattgttatttattactggcaacaccttacagtgtatcatgcttgtttattgtttcttaggctattgttgctgctgctactttggccttttctgtttactcaaccgttacttcaggcttactcttggtgtttatgactacttggtctctacacaagaatttaggtatatgaactcccaggggcttttgcctcctaagagtagtattgatgctttcaagcttaacattaagttgttgggtattggaggtaaaccatgtatcaaggttgctactgtacagtctaaaatgtctgacgtaaagtgcacatctgtggtactgctctcggttcttcaacaacttagagtagagtcatcttctaaattgtgggcacaatgtgtacaactccacaatgatattcttcttgcaaaagacacaactgaagctttcgagaagatggtttctcttttgtctgttttgctatccatgcagggtgctgtagacattaataggttgtgcgaggaaatgctcgataaccgtgctactcttcaggctattgcttcagaatttagttctttaccatcatatgccgcttatgccactgcccaggaggcctatgagcaggctgtagctaatggtgattctgaagtcgttctcaaaaagttaaagaaatctttgaatgtggctaaatctgagtttgaccgtgatgctgccatgcaacgcaagttggaaaagatggcagatcaggctatgacccaaatgtacaaacaggcaagatctgaggacaagagggcaaaagtaactagtgctatgcaaacaatgctcttcactatgcttaggaagcttgataatgatgcacttaacaacattatcaacaatgcgcgtgatggttgtgttccactcaacatcataccattgactacagcagccaaactcatggttgttgtccctgattatggtacctacaagaacacttgtgatggtaacacctttacatatgcatctgcactctgggaaatccagcaagttgttgatgcggatagcaagattgttcaacttagtgaaattaacatggacaattcaccaaatttggcttggcctcttattgttacagctctaagagccaactcagctgttaaactacagaataatgaactgagtccagtagcactacgacagatgtcctgtgcggctggtaccacacaaacagcttgtactgatgacaatgcacttgcctactataacaattcgaagggaggtaggtttgtgctggcattactatcagaccaccaagatctcaaatgggctagattccctaagagtgatggtacaggtacaatttacacagaactggaaccaccttgtaggtttgttacagacacaccaaaagggcctaaagtgaaatacttgtacttcatcaaaggcttaaacaacctaaatagaggtatggtgctgggcagtttagctgctacagtacgtcttcaggctggaaatgctacagaagtacctgccaattcaactgtgctttccttctgtgcttttgcagtagaccctgctaaagcatataaggattacctagcaagtggaggacaaccaatcaccaactgtgtgaagatgttgtgtacacacactggtacaggacaggcaattactgtaacaccagaagctaacatggaccaagagtcctttggtggtgcttcatgttgtctgtattgtagatgccacattgaccatccaaatcctaaaggattctgtgacttgaaaggtaagtacgtccaaatacctaccacttgtgctaatgacccagtgggttttacacttagaaacacagtctgtaccgtctgcggaatgtggaaaggttatggctgtagttgtgaccaactccgcgaacccttgatgcagtctgcggatgcatcaacgtttttaaacgggtttgcggtgtaagtgcagcccgtcttacaccgtgcggcacaggcactagtactgatgtcgtctacagggcttttgatatttacaacgaaaaagttgctggttttgcaaagttcctaaaaactaattgctgtcgcttccaggagaaggatgaggaaggcaatttattagactcttactttgtagttaagaggcatactatgtctaactaccaacatgaagagactatttataacttggttaaagattgtccagcggttgctgtccatgactttttcaagtttagagtagatggtgacatggtaccacatatatcacgtcagcgtctaactaaatacacaatggctgatttagtctatgctctacgtcattttgatgagggtaattgtgatacattaaaagaaatactcgtcacatacaattgctgtgatgatgattatttcaataagaaggattggtatgacttcgtagagaatcctgacatcttacgcgtatatgctaacttaggtgagcgtgtacgccaatcattattaaagactgtacaattctgcgatgctatgcgtgatgcaggcattgtaggcgtactgacattagataatcaggatcttaatgggaactggtacgatttcggtgatttcgtacaagtagcaccaggctgcggagttcctattgtggattcatattactcattgctgatgcccatcctcactttgactagggcattggctgctgagtcccatatggatgctgatctcgcaaaaccacttattaagtgggatttgctgaaatatgattttacggaagagagactttgtctcttcgaccgttattttaaatattgggaccagacataccatcccaattgtattaactgtttggatgataggtgtatccttcattgtgcaaactttaatgtgttattttctactgtgtttccacctacaagttttggaccactagtaagaaaaatatttgtagatggtgttccttttgttgtttcaactggataccattttcgtgagttaggagtcgtacataatcaggatgtaaacttacatagctcgcgtctcagtttcaaggaacttttagtgtatgctgctgatccagctatgcatgcagcttctggcaatttattgctagataaacgcactacatgcttttcagtagctgcactaacaaacaatgttgcttttcaaactgtcaaacccggtaattttaataaagacttttatgactttgctgtgtctaaaggtttctttaaggaaggaagttctgttgaactaaaacacttcttctttgctcaggatggcaacgctgctatcagtgattatgactattatcgttataatctgccaacaatgtgtgatatcagacaactcctattcgtagttgaagttgttgataaatactttgattgttacgatggtggctgtattaatgccaaccaagtaatcgttaacaatctggataaatcagctggtttcccatttaataaatggggtaaggctagactttattatgactcaatgagttatgaggatcaagatgcacttttcgcgtatactaagcgtaatgtcatccctactataactcaaatgaatcttaagtatgccattagtgcaaagaatagagctcgcaccgtagctggtgtctctatctgtagtactatgacaaatagacagtttcatcagaaattattgaagtcaatagccgccactagaggagctactgtggtaattggaacaagcaagttttacggtggctggcataatatgttaaaaactgtttacagtgatgtagaaactccacaccttatgggttgggattatccaaaatgtgacagagccatgcctaacatgcttaggataatggcctctcttgttcttgctcgcaaacataacacttgctgtaacttatcacaccgtttctacaggttagctaacgagtgtgcgcaagtattaagtgagatggtcatgtgtggcggctcactatatgttaaaccaggtggaacatcatccggtgatgctacaactgcttatgctaatagtgtctttaacatttgtcaagctgttacagccaatgtaaatgcacttctttcaactgatggtaataagatagctgacaagtatgtccgcaatctacaacacaggctctatgagtgtctctatagaaatagggatgttgatcatgaattcgtggatgagttttacgcttacctgcgtaaacatttctccatgatgattctttctgatgatgccgttgtgtgctataacagtaactatgcggctcaaggtttagtagctagcattaagaactttaaggcagttctttattatcaaaataatgtgttcatgtctgaggcaaaatgttggactgagactgaccttactaaaggacctcacgaattttgctcacagcatacaatgctagttaaacaaggagatgattacgtgtacctgccttacccagatccatcaagaatattaggcgcaggctgttttgtcgatgatattgtcaaaacagatggtacacttatgattgaaaggttcgtgtcactggctattgatgcttacccacttacaaaacatcctaatcaggagtatgctgatgtctttcacttgtatttacaatacattagaaagttacatgatgagcttactggccacatgttggacatgtattccgtaatgctaactaatgataacacctcacggtactgggaacctgagttttatgaggctatgtacacaccacatacagtcttgcaggctgtaggtgcttgtgtattgtgcaattcacagacttcacttcgttgcggtgcctgtattaggagaccattcctatgttgcaagtgctgctatgaccatgtcatttcaacatcacacaaattagtgttgtctgttaatccctatgtttgcaatgccccaggttgtgatgtcactgatgtgacacaactgtatctaggaggtatgagctattattgcaagtcacataagcctcccattagttttccattatgtgctaatggtcaggtttttggtttatacaaaaacacatgtgtaggcagtgacaatgtcactgacttcaatgcgatagcaacatgtgattggactaatgctggcgattacatacttgccaacacttgtactgagagactcaagcttttcgcagcagaaacgctcaaagccactgaggaaacatttaagctgtcatatggtattgccactgtacgcgaagtactctctgacagagaattgcatctttcatgggaggttggaaaacctagaccaccattgaacagaaactatgtctttactggttaccgtgtaactaaaaatagtaaagtacagattggagagtacacctttgaaaaaggtgactatggtgatgctgttgtgtacagaggtactacgacatacaagttgaatgttggtgattactttgtgttgacatctcacactgtaatgccacttagtgcacctactctagtgccacaagagcactatgtgagaattactggcttgtacccaacactcaacatctcagatgagttttctagcaatgttgcaaattatcaaaaggtcggcatgcaaaagtactctacactccaaggaccacctggtactggtaagagtcattttgccatcggacttgctctctattacccatctgctcgcatagtgtatacggcatgctctcatgcagctgttgatgccctatgtgaaaaggcattaaaatatttgcccatagataaatgtagtagaatcatacctgcgcgtgcgcgcgtagagtgttttgataaattcaaagtgaattcaacactagaacagtatgttttctgcactgtaaatgcattgccagaaacaactgctgacattgtagtctttgatgaaatctctatggctactaattatgacttgagtgttgtcaatgctagacttcgtgcaaaacactacgtctatattggcgatcctgctcaattaccagccccccgcacattgctgactaaaggcacactagaaccagaatattttaattcagtgtgcagacttatgaaaacaataggtccagacatgttccttggaacttgtcgccgttgtcctgctgaaattgttgacactgtgagtgctttagtttatgacaataagctaaaagcacacaaggataagtcagctcaatgcttcaaaatgttctacaaaggtgttattacacatgatgtttcatctgcaatcaacagacctcaaataggcgttgtaagagaatttcttacacgcaatcctgcttggagaaaagctgtttttatctcaccttataattcacagaacgctgtagcttcaaaaatcttaggattgcctacgcagactgttgattcatcacagggttctgaatatgactatgtcatattcacacaaactactgaaacagcacactcttgtaatgtcaaccgcttcaatgtggctatcacaagggcaaaaattggcattttgtgcataatgtctgatagagatctttatgacaaactgcaatttacaagtctagaaataccacgtcgcaatgtggctacattacaagcagaaaatgtaactggactttttaaggactgtagtaagatcattactggtcttcatcctacacaggcacctacacacctcagcgttgatataaagttcaagactgaaggattatgtgttgacataccaggcataccaaaggacatgacctaccgtagactcatctctatgatgggtttcaaaatgaattaccaagtcaatggttaccctaatatgtttatcacccgcgaagaagctattcgtcacgttcgtgcgtggattggctttgatgtagagggctgtcatgcaactagagatgctgtgggtactaacctacctctccagctaggattttctacaggtgttaacttagtagctgtaccgactggttatgttgacactgaaaataacacagaattcaccagagttaatgcaaaacctccaccaggtgaccagtttaaacatcttataccactcatgtataaaggcttgccctggaatgtagtgcgtattaagatagtacaaatgctcagtgatacactgaaaggattgtcagacagagtcgtgttcgtcctttgggcgcatggctttgagcttacatcaatgaagtactttgtcaagattggacctgaaagaacgtgttgtctgtgtgacaaacgtgcaacttgcttttctacttcatcagatacttatgcctgctggaatcattctgtgggttttgactatgtctataacccatttatgattgatgttcagcagtggggctttacgggtaaccttcagagtaaccatgaccaacattgccaggtacatggaaatgcacatgtggctagttgtgatgctatcatgactagatgtttagcagtccatgagtgctttgttaagcgcgttgattggtctgttgaataccctattataggagatgaactgagggttaattctgcttgcagaaaagtacaacacatggttgtgaagtctgcattgcttgctgataagtttccagttcttcatgacattggaaatccaaaggctatcaagtgtgtgcctcaggctgaagtagaatggaagttctacgatgctcagccatgtagtgacaaagcttacaaaatagaggaactcttctattcttatgctatacatcacgataaattcactgatggtgtttgtttgttttggaattgtaacgttgatcgttacccagccaatgcaattgtgtgtaggtttgacacaagagtcttgtcaaacttgaacttaccaggctgtgatggtggtagtttgtatgtgaataagcatgcattccacactccagctttcgataaaagtgcatttactaatttaaagcaattgcctttcttttactattctgatagtccttgtgagtctcatggcaaacaagtagtgtcggatattgattatgttccactcaaatctgctacgtgtattacacgatgcaatttaggtggtgctgtttgcagacaccatgcaaatgagtaccgacagtacttggatgcatataatatgatgatttctgctggatttagcctatggatttacaaacaatttgatacttataacctgtggaatacatttaccaggttacagagtttagaaaatgtggcttataatgttgttaataaaggacactttgatggacacgccggcgaagcacctgtttccatcattaataatgctgtttacacaaaggtagatggtattgatgtggagatctttgaaaataagacaacacttcctgttaatgttgcatttgagctttgggctaagcgtaacattaaaccagtgccagagattaagatactcaataatttgggtgttgatatcgctgctaatactgtaatctgggactacaaaagagaagccccagcacatgtatctacaataggtgtctgcacaatgactgacattgccaagaaacctactgagagtgcttgttcttcacttactgtcttgtttgatggtagagtggaaggacaggtagacctttttagaaacgcccgtaatggtgttttaataacagaaggttcagtcaaaggtctaacaccttcaaagggaccagcacaagctagcgtcaatggagtcacattaattggagaatcagtaaaaacacagtttaactactttaagaaagtagacggcattattcaacagttgcctgaaacctactttactcagagcagagacttagaggattttaagcccagatcacaaatggaaactgactttctcgagctcgctatggatgaattcatacagcgatataagctcgagggctatgccttcgaacacatcgtttatggagatttcagtcatggacaacttggcggtcttcatttaatgataggcttagccaagcgctcacaagattcaccacttaaattagaggattttatccctatggacagcacagtgaaaaattacttcataacagatgcgcaaacaggttcatcaaaatgtgtgtgttctgtgattgatcttttacttgatgactttgtcgagataataaagtcacaagatttgtcagtgatttcaaaagtggtcaaggttacaattgactatgctgaaatttcattcatgctttggtgtaaggatggacatgttgaaaccttctacccaaaactacaagcaagtcaagcgtggcaaccaggtgttgcgatgcctaacttgtacaagatgcaaagaatgcttcttgaaaagtgtgaccttcagaattatggtgaaaatgctgttataccaaaaggaataatgatgaatgtcgcaaagtatactcaactgtgtcaatacttaaatacacttactttagctgtaccctacaacatgagagttattcactttggtgctggctctgataaaggagttgcaccaggtacagctgtgctcagacaatggttgccaactggcacactacttgtcgattcagatcttaatgacttcgtctccgacgcagattctactttaattggagactgtgcaacagtacatacggctaataaatgggaccttattattagcgatatgtatgaccctaggaccaaacatgtgacaaaagagaatgactctaaagaagggtttttcacttatctgtgtggatttataaagcaaaaactagccctgggtggttctatagctgtaaagataacagagcattcttggaatgctgacctttacaagcttatgggccatttctcatggtggacagcttttgttacaaatgtaaatgcatcatcatcggaagcatttttaattggggctaactatcttggcaagccgaaggaacaaattgatggctataccatgcatgctaactacattttctggaggaacacaaatcctatccagttgtcttcctattcactctttgacatgagcaaatttcctcttaaattaagaggaactgctgtaatgtctcttaaggagaatcaaatcaatgatatgatttattctcttctggaaaaaggtaggcttatcattagagaaaacaacagagttgtggtttcaagtgatattcttgttaacaactaaacgaacatgtttattttcttattatttcttactctcactagtggtagtgaccttgaccggtgcaccacttttgatgatgttcaagctcctaattacactcaacatacttcatctatgaggggggtttactatcctgatgaaatttttagatcagacactctttatttaactcaggatttatttcttccattttattctaatgttacagggtttcatactattaatcatacgtttggcaaccctgtcataccttttaaggatggtatttattttgctgccacagagaaatcaaatgttgtccgtggttgggtttttggttctaccatgaacaacaagtcacagtcggtgattattattaacaattctactaatgttgttatacgagcatgtaactttgaattgtgtgacaaccctttctttgctgtttctaaacccatgggtacacagacacatactatgatattcgataatgcatttaattgcactttcgagtacatatctgatgccttttcgcttgatgtttcagaaaagtcaggtaattttaaacacttacgagagtttgtgtttaaaaataaagatgggtttctctatgtttataagggctatcaacctatagatgtagttcgtgatctaccttctggttttaacactttgaaacctatttttaagttgcctcttggtattaacattacaaattttagagccattcttacagccttttcacctgctcaagacatttggggcacgtcagctgcagcctattttgttggctatttaaagccaactacatttatgctcaagtatgatgaaaatggtacaatcacagatgctgttgattgttctcaaaatccacttgctgaactcaaatgctctgttaagagctttgagattgacaaaggaatttaccagacctctaatttcagggttgttccctcaggagatgttgtgagattccctaatattacaaacttgtgtccttttggagaggtttttaatgctactaaattcccttctgtctatgcatgggagagaaaaaaaatttctaattgtgttgctgattactctgtgctctacaactcaacatttttttcaacctttaagtgctatggcgtttctgccactaagttgaatgatctttgcttctccaatgtctatgcagattcttttgtagtcaagggagatgatgtaagacaaatagcgccaggacaaactggtgttattgctgattataattataaattgccagatgatttcatgggttgtgtccttgcttggaatactaggaacattgatgctacttcaactggtaattataattataaatataggtatcttagacatggcaagcttaggccctttgagagagacatatctaatgtgcctttctcccctgatggcaaaccttgcaccccacctgctcttaattgttattggccattaaatgattatggtttttacaccactactggcattggctaccaaccttacagagttgtagtactttcttttgaacttttaaatgcaccggccacggtttgtggaccaaaattatccactgaccttattaagaaccagtgtgtcaattttaattttaatggactcactggtactggtgtgttaactccttcttcaaagagatttcaaccatttcaacaatttggccgtgatgtttctgatttcactgattccgttcgagatcctaaaacatctgaaatattagacatttcaccttgctcttttgggggtgtaagtgtaattacacctggaacaaatgcttcatctgaagttgctgttctatatcaagatgttaactgcactgatgtttctacagcaattcatgcagatcaactcacaccagcttggcgcatatattctactggaaacaatgtattccagactcaagcaggctgtcttataggagctgagcatgtcgacacttcttatgagtgcgacattcctattggagctggcatttgtgctagttaccatacagtttctttattacgtagtactagccaaaaatctattgtggcttatactatgtctttaggtgctgatagttcaattgcttactctaataacaccattgctatacctactaacttttcaattagcattactacagaagtaatgcctgtttctatggctaaaacctccgtagattgtaatatgtacatctgcggagattctactgaatgtgctaatttgcttctccaatatggtagcttttgcacacaactaaatcgtgcactctcaggtattgctgctgaacaggatcgcaacacacgtgaagtgttcgctcaagtcaaacaaatgtacaaaaccccaactttgaaatattttggtggttttaatttttcacaaatattacctgaccctctaaagccaactaagaggtcttttattgaggacttgctctttaataaggtgacactcgctgatgctggcttcatgaagcaatatggcgaatgcctaggtgatattaatgctagagatctcatttgtgcgcagaagttcaatggacttacagtgttgccacctctgctcactgatgatatgattgctgcctacactgctgctctagttagtggtactgccactgctggatggacatttggtgctggcgctgctcttcaaataccttttgctatgcaaatggcatataggttcaatggcattggagttacccaaaatgttctctatgagaaccaaaaacaaatcgccaaccaatttaacaaggcgattagtcaaattcaagaatcacttacaacaacatcaactgcattgggcaagctgcaagacgttgttaaccagaatgctcaagcattaaacacacttgttaaacaacttagctctaattttggtgcaatttcaagtgtgctaaatgatatcctttcgcgacttgataaagtcgaggcggaggtacaaattgacaggttaattacaggcagacttcaaagccttcaaacctatgtaacacaacaactaatcagggctgctgaaatcagggcttctgctaatcttgctgctactaaaatgtctgagtgtgttcttggacaatcaaaaagagttgacttttgtggaaagggctaccaccttatgtccttcccacaagcagccccgcatggtgttgtcttcctacatgtcacgtatgtgccatcccaggagaggaacttcaccacagcgccagcaatttgtcatgaaggcaaagcatacttccctcgtgaaggtgtttttgtgtttaatggcacttcttggtttattacacagaggaacttcttttctccacaaataattactacagacaatacatttgtctcaggaaattgtgatgtcgttattggcatcattaacaacacagtttatgatcctctgcaacctgagcttgactcattcaaagaagagctggacaagtacttcaaaaatcatacatcaccagatgttgatcttggcgacatttcaggcattaacgcttctgtcgtcaacattcaaaaagaaattgaccgcctcaatgaggtcgctaaaaatttaaatgaatcactcattgaccttcaagaattgggaaaatatgagcaatatattaaatggccttggtatgtttggctcggcttcattgctggactaattgccatcgtcatggttacaatcttgctttgttgcatgactagttgttgcagttgcctcaagggtgcatgctcttgtggttcttgctgcaagtttgatgaggatgactctgagccagttctcaagggtgtcaaattacattacacataaacgaacttatggatttgtttatgagattttttactcttggatcaattactgcacagccagtaaaaattgacaatgcttctcctgcaagtactgttcatgctacagcaacgataccgctacaagcctcactccctttcggatggcttgttattggcgttgcatttcttgctgtttttcagagcgctaccaaaataattgcgctcaataaaagatggcagctagccctttataagggcttccagttcatttgcaatttactgctgctatttgttaccatctattcacatcttttgcttgtcgctgcaggtatggaggcgcaatttttgtacctctatgccttgatatattttctacaatgcatcaacgcatgtagaattattatgagatgttggctttgttggaagtgcaaatccaagaacccattactttatgatgccaactactttgtttgctggcacacacataactatgactactgtataccatataacagtgtcacagatacaattgtcgttactgaaggtgacggcatttcaacaccaaaactcaaagaagactaccaaattggtggttattctgaggataggcactcaggtgttaaagactatgtcgttgtacatggctatttcaccgaagtttactaccagcttgagtctacacaaattactacagacactggtattgaaaatgctacattcttcatctttaacaagcttgttaaagacccaccgaatgtgcaaatacacacaatcgacggctcttcaggagttgctaatccagcaatggatccaatttatgatgagccgacgacgactactagcgtgcctttgtaagcacaagaaagtgagtacgaacttatgtactcattcgtttcggaagaaacaggtacgttaatagttaatagcgtacttctttttcttgctttcgtggtattcttgctagtcacactagccatccttactgcgcttcgattgtgtgcgtactgctgcaatattgttaacgtgagtttagtaaaaccaacggtttacgtctactcgcgtgttaaaaatctgaactcttctgaaggagttcctgatcttctggtctaaacgaactaactattattattattctgtttggaactttaacattgcttatcatggcagacaacggtactattaccgttgagaagcttaaacaactcctggaacaatggaacctagtaataggtttcctattcctagcctggattatgttactacaatttgcctattctaatcggaacaggtttttgtacataataaagcttgttttcctctggctcttgtggccagtaacacttgcttgttttgtgcttgctgctgtctacagaattaattgggtgactggcgggattgcgattgcaatggcttgtattgtaggcttgatgtggcttagctacttcgttgcttccttcaggctgtttgctcgtacccgctcaatgtggtcattcaacccagaaacaaacattcttctcaatgtgcctctccgggggacaattgtgaccagaccgctcatggaaagtgaacttgtcattggtgctgtgatcattcgtggtcacttgcgaatggccggacactccctagggcgctgtgacattaaggacctgccaaaagagatcactgtggctacatcacgaacgctttcttattacaaattaggagcgtcgcagcgtgtaggcactgattcaggttttgctgcatacaaccgctaccgtattggaaactataaattaaatacagaccacgccggtagcaacgacaatattgctttgctagtacagtaagtgacaacagatgtttcatcttgttgacttccaggttacaatagcagagatattgattatcattatgaggactttcaggattgctatttggaatcttgacgttataataagttcaatagtgagacaattatttaagcctctaactaagaagaattattcggagttagatgatgaagaacctatggagttagattatccataaaacgaacatgaaaattattctcttcctgacattgattgtatttacatcttgcgagctatatcactatcaggagtgtgttagaggtacgactgtactactaaaagaaccttgcccatcaggaacatacgagggcaattcaccatttcaccctcttgctgacaataaatttgcactaacttgcactagcacacactttgcttttgcttgtgctgacggtactcgacatacctatcagctgcgtgcaagatcagtttcaccaaaacttttcatcagacaagaggaggttcaacaagagctctactcgccactttttctcattgttgctgctctagtatttttaatactttgcttcaccattaagagaaagacagaatgaatgagctcactttaattgacttctatttgtgctttttagcctttctgctattccttgttttaataatgcttattatattttggttttcactcgaaatccaggatctagaagaaccttgtaccaaagtctaaacgaacatgaaacttctcattgttttgacttgtatttctctatgcagttgcatatgcactgtagtacagcgctgtgcatctaataaacctcatgtgcttgaagatccttgtaaggtacaacactaggggtaatacttatagcactgcttggctttgtgctctaggaaaggttttaccttttcatagatggcacactatggttcaaacatgcacacctaatgttactatcaactgtcaagatccagctggtggtgcgcttatagctaggtgttggtaccttcatgaaggtcaccaaactgctgcatttagagacgtacttgttgttttaaataaacgaacaaattaaaatgtctgataatggaccccaatcaaaccaacgtagtgccccccgcattacatttggtggacccacagattcaactgacaataaccagaatggaggacgcaatggggcaaggccaaaacagcgccgaccccaaggtttacccaataatactgcgtcttggttcacagctctcactcagcatggcaaggaggaacttagattccctcgaggccagggcgttccaatcaacaccaatagtggtccagatgaccaaattggctactaccgaagagctacccgacgagttcgtggtggtgacggcaaaatgaaagagctcagccccagatggtacttctattacctaggaactggcccagaagcttcacttccctacggcgctaacaaagaaggcatcgtatgggttgcaactgagggagccttgaatacacccaaagaccacattggcacccgcaatcctaataacaatgctgccaccgtgctacaacttcctcaaggaacaacattgccaaaaggcttctacgcagagggaagcagaggcggcagtcaagcctcttctcgctcctcatcacgtagtcgcggtaattcaagaaattcaactcctggcagcagtaggggaaattctcctgctcgaatggctagcggaggtggtgaaactgccctcgcgctattgctgctagacagattgaaccagcttgagagcaaagtttctggtaaaggccaacaacaacaaggccaaactgtcactaagaaatctgctgctgaggcatctaaaaagcctcgccaaaaacgtactgccacaaaacagtacaacgtcactcaagcatttgggagacgtggtccagaacaaacccaaggaaatttcggggaccaagacctaatcagacaaggaactgattacaaacattggccgcaaattgcacaatttgctccaagtgcctctgcattctttggaatgtcacgcattggcatggaagtcacaccttcgggaacatggctgacttatcatggagccattaaattggatgacaaagatccacaattcaaagacaacgtcatactgctgaacaagcacattgacgcatacaaaacattcccaccaacagagcctaaaaaggacaaaaagaaaaagactgatgaagctcagcctttgccgcagagacaaaagaagcagcccactgtgactcttcttcctgcggctgacatggatgatttctccagacaacttcaaaattccatgagtggagcttctgctgattcaactcaggcataaacactcatgatgaccacacaaggcagatgggctatgtaaacgttttcgcaattccgtttacgatacatagtctactcttgtgcagaatgaattctcgtaactaaacagcacaagtaggtttagttaactttaatctcacatagcaatctttaatcaatgtgtaacattagggaggacttgaaagagccaccacattttcatcgaggccacgcggagtacgatcgagggtacagtgaataatgctagggagagctgcctatatggaagagccctaatgtgtaaaattaattttagtagtgctatccccatgtgattttaatagcttcttaggagaatgac

SEQ ID NO: 66 - DNA, 29705 bp, Coronavirus
tacccaggaaaagccaaccaacctcgatctcttgtagatctgttctctaaacgaactttaaaatctgtgtagctgtcgctcggctgcatgcctagtgcacctacgcagtataaacaataataaattttactgtcgttgacaagaaacgagtaactcgtccctcttctgcagactgcttacggtttcgtccgtgttgcagtcgatcatcagcatacctaggtttcgtccgggtgtgaccgaaaggtaagatggagagccttgttcttggtgtcaacgagaaaacacacgtccaactcagtttgcctgtccttcaggttagagacgtgctagtgcgtggcttcggggactctgtggaagaggccctatcggaggcacgtgaacacctcaaaaatggcacttgtggtctagtagagctggaaaaaggcgtactgccccagcttgaacagccctatgtgttcattaaacgttctgatgccttaagcaccaatcacggccacaaggtcgttgagctggttgcagaaatggacggcattcagtacggtcgtagcggtataacactgggagtactcgtgccacatgtgggcgaaaccccaattgcataccgcaatgttcttcttcgtaagaacggtaataagggagccggtggtcatagctatggcatcgatctaaagtcttatgacttaggtgacgagcttggcactgatcccattgaagattatgaacaaaactggaacactaagcatggcagtggtgcactccgtgaactcactcgtgagctcaatggaggtgcagtcactcgctatgtcgacaacaatttctgtggcccagatgggtaccctcttgattgcatcaaagattttctcgcacgcgcgggcaagtcaatgtgcactctttccgaacaacttgattacatcgagtcgaagagaggtgtctactgctgccgtgaccatgagcatgaaattgcctggttcactgagcgctctgataagagctacgagcaccagacacccttcgaaattaagagtgccaagaaatttgacactttcaaaggggaatgcccaaagtttgtgtttcctcttaactcaaaagtcaaagtcattcaaccacgtgttgaaaagaaaaagactgagggtttcatggggcgtatacgctctgtgtaccctgttgcatctccacaggagtgtaacaatatgcacttgtctaccttgatgaaatgtaatcattgcgatgaagtttcatggcagacgtgcgactttctgaaagccacttgtgaacattgtggcactgaaaatttagttattgaaggacctactacatgtgggtacctacctactaatgctgtagtgaaaatgccatgtcctgcctgtcaagacccagagattggacctgagcatagtgttgcagattatcacaaccactcaaacattgaaactcgactccgcaagggaggtaggactaggtgttttggaggctgtgtgtttgcctatgttggctgctataataagcgtgcctactgggttcctcgtgctagtgctgatattggctcaggccatactggcattactggtgacaatgtggagaccttgaatgaggatctccttgagatactgagtcgtgaacgtgttaacattaacattgttggcgattttcatttgaatgaagaggttgccatcattttggcatctttctctgcttctacaagtgcctttattgacactataaagagtcttgattacaagtctttcaaaaccattgttgagtcctgcggtaactataaagttaccaagggaaagcccgtaaaaggtgcttggaacattggacaacagagatcagttttaacaccactgtgtggttttccctcacaggctgctggtgttatcagatcaatttttgcgcgcacacttgatgcagcaaaccactcaattcctgatttgcaaagagcagctgtcaccatacttgatggtatttctgaacagtcattacgtcttgtcgacgccatggtttatacttcagacctgctcaccaacagtgtcattattatggcatatgtaactggtggtcttgtacaacagacttctcagtggttgtctaatcttttgggcactactgttgaaaaactcaggcctatctttgaatggattgaggcgaaacttagtgcaggagttgaatttctcaaggatgcttgggagattctcaaatttctcattacaggtgtttttgacatcgtcaagggtcaaatacaggttgcttcagataacatcaaggattgtgtaaaatgcttcattgatgttgttaacaaggcactcgaaatgtgcattgatcaagtcactatcgctggcgcaaagttgcgatcactcaacttaggtgaagtcttcatcgctcaaagcaagggactttaccgtcagtgtatacgtggcaaggagcagctgcaactactcatgcctcttaaggcaccaaaagaagtaacctttcttgaaggtgattcacatgacacagtacttacctctgaggaggttgttctcaagaacggtgaactcgaagcactcgagacgcccgttgatagcttcacaaatggagctatcgttggcacaccagtctgtgtaaatggcctcatgctcttagagattaaggacaaagaacaatactgcgcattgtctcctggtttactggctacaaacaatgtctttcgcttaaaagggggtgcaccaattaaaggtgtaacctttggagaagatactgtttgggaagttcaaggttacaagaatgtgagaatcacatttgagcttgatgaacgtgttgacaaagtgcttaatgaaaagtgctctgtctacactgttgaatccggtaccgaagttactgagtttgcatgtgttgtagcagaggctgttgtgaagactttacaaccagtttctgatctccttaccaacatgggtattgatcttgatgagtggagtgtagctacattctacttatttgatgatgctggtgaagaaaacttttcatcacgtatgtattgttccttttaccctccagatgaggaagaagaggacgatgcagagtgtgaggaagaagaaattgatgaaacctgtgaacatgagtacggtacagaggatgattatcaaggtctccctctggaatttggtgcctcagctgaaacagttcgagttgaggaagaagaagaggaagactggctggatgatactactgagcaatcagagattgagccagaaccagaacctacacctgaagaaccagttaatcagtttactggttatttaaaacttactgacaatgttgccattaaatgtgttgacatcgttaaggaggcacaaagtgctaatcctatggtgattgtaaatgctgctaacatacacctgaaacatggtggtggtgtagcaggtgcactcaacaaggcaaccaatggtgccatgcaaaaggagagtgatgattacattaagctaaatggccctcttacagtaggagggtcttgtttgctttctggacataatcttgctaagaagtgtctgcatgttgttggacctaacctaaatgcaggtgaggacatccagcttcttaaggcagcatatgaaaatttcaattcacaggacatcttacttgcaccattgttgtcagcaggcatatttggtgctaaaccacttcagtctttacaagtgtgcgtgcagacggttcgtacacaggtttatattgcagtcaatgacaaagctctttatgagcaggttgtcatggattatcttgataacctgaagcctagagtggaagcacctaaacaagaggagccaccaaacacagaagattccaaaactgaggagaaatctgtcgtacagaagcctgtcgatgtgaagccaaaaattaaggcctgcattgatgaggttaccacaacactggaagaaactaagtttcttaccaataagttactcttgtttgctgatatcaatggtaagctttaccatgattctcagaacatgcttagaggtgaagatatgtctttccttgagaaggatgcaccttacatggtaggtgatgttatcactagtggtgatatcacttgtgttgtaataccctccaaaaaggctggtggcactactgagatgctctcaagagctttgaagaaagtgccagttgatgagtatataaccacgtaccctggacaaggatgtgctggttatacacttgaggaagctaagactgctcttaagaaatgcaaatctgcattttatgtactaccttcagaagcacctaatgctaaggaagagattctaggaactgtatcctggaatttgagagaaatgcttgctcatgctgaagagacaagaaaattaatgcctatatgcatggatgttagagccataatggcaaccatccaacgtaagtataaaggaattaaaattcaagagggcatcgttgactatggtgtccgattcttcttttatactagtaaagagcctgtagcttctattattacgaagctgaactctctaaatgagccgcttgtcacaatgccaattggttatgtgacacatggttttaatcttgaagaggctgcgcgctgtatgcgttctcttaaagctcctgccgtagtgtcagtatcatcaccagatgctgttactacatataatggatacctcacttcgtcatcaaagacatctgaggagcactttgtagaaacagtttctttggctggctcttacagagattggtcctattcaggacagcgtacagagttaggtgttgaatttcttaagcgtggtgacaaaattgtgtaccacactctggagagccccgtcgagtttcatcttgacggtgaggttctttcacttgacaaactaaagagtctcttatccctgcgggaggttaagactataaaagtgttcacaactgtggacaacactaatctccacacacagcttgtggatatgtctatgacatatggacagcagtttggtccaacatacttggatggtgctgatgttacaaaaattaaacctcatgtaaatcatgagggtaagactttctttgtactacctagtgatgacacactacgtagtgaagctttcgagtactaccatactcttgatgagagttttcttggtaggtacatgtctgctttaaaccacacaaagaaatggaaatttcctcaagttggtggtttaacttcaattaaatgggctgataacaattgttatttgtctagtgttttattagcacttcaacagcttgaagtcaaattcaatgcaccagcacttcaagaggcttattatagagcccgtgctggtgatgctgctaacttttgtgcactcatactcgcttacagtaataaaactgttggcgagcttggtgatgtcagagaaactatgacccatcttctacagcatgctaatttggaatctgcaaagcgagttcttaatgtggtgtgtaaacattgtggtcagaaaactactaccttaacgggtgtagaagctgtgatgtatatgggtactctatcttatgataatcttaagacaggtgtttccattccatgtgtgtgtggtcgtgatgctacacaatatctagtacaacaagagtcttcttttgttatgatgtctgcaccacctgctgagtataaattacagcaaggtacattcttatgtgcgaatgagtacactggtaactatcagtgtggtcattacactcatataactgctaaggagaccctctatcgtattgacggagctcaccttacaaagatgtcagagtacaaaggaccagtgactgatgttttctacaaggaaacatcttacactacaaccatcaagcctgtgtcgtataaactcgatggagttacttacacagagattgaaccaaaattggatgggtattataaaaaggataatgcttactatacagagcagcctatagaccttgtaccaactcaaccattaccaaatgcgagttttgataatttcaaactcacatgttctaacacaaaatttgctgatgatttaaatcaaatgacaggcttcacaaagccagcttcacgagagctatctgtcacattcttcccagacttgaatggcgatgtagtggctattgactatagacactattcagcgagtttcaagaaaggtgctaaattactgcataagccaattgtttggcacattaaccaggctacaaccaagacaacgttcaaaccaaacacttggtgtttacgttgtctttggagtacaaagccagtagatacttcaaattcatttgaagttctggcagtagaagacacacaaggaatggacaatcttgcttgtgaaagtcaacaacccacctctgaagaagtagtggaaaatcctaccatacagaaggaagtcatagagtgtgacgtgaaaactaccgaagttgtaggcaatgtcatacttaaaccatcagatgaaggtgttaaagtaacacaagagttaggtcatgaggatcttatggctgcttatgtggaaaacacaagcattaccattaagaaacctaatgagctttcactagccttaggtttaaaaacaattgccactcatggtattgctgcaattaatagtgttccttggagtaaaattttggcttatgtcaaaccattcttaggacaagcagcaattacaacatcaaattgcgctaagagattagcacaacgtgtgtttaacaattatatgccttatgtgtttacattattgttccaattgtgtacttttactaaaagtaccaattctagaattagagcttcactacctacaactattgctaaaaatagtgttaagagtgttgctaaattatgtttggatgccggcattaattatgtgaagtcacccaaattttctaaattgttcacaatcgctatgtggctattgttgttaagtatttgcttaggttctctaatctgtgtaactgctgcttttggtgtactcttatctaattttggtgctccttcttattgtaatggcgttagagaattgtatcttaattcgtctaacgttactactatggatttctgtgaaggttcttttccttgcagcatttgtttaagtggattagactcccttgattcttatccagctcttgaaaccattcaggtgacgatttcatcgtacaagctagacttgacaattttaggtctggccgctgagtgggttttggcatatatgttgttcacaaaattcttttatttattaggtctttcagctataatgcaggtgttctttggctattttgctagtcatttcatcagcaattcttggctcatgtggtttatcattagtattgtacaaatggcacccgtttctgcaatggttaggatgtacatcttctttgcttctttctactacatatggaagagctatgttcatatcatggatggttgcacctcttcgacttgcatgatgtgctataagcgcaatcgtgccacacgcgttgagtgtacaactattgttaatggcatgaagagatctttctatgtctatgcaaatggaggccgtggcttctgcaagactcacaattggaattgtctcaattgtgacacattttgcactggtagtacattcattagtgatgaagttgctcgtgatttgtcactccagtttaaaagaccaatcaaccctactgaccagtcatcgtatattgttgatagtgttgctgtgaaaaatggcgcgcttcacctctactttgacaaggctggtcaaaagacctatgagagacatccgctctcccattttgtcaatttagacaatttgagagctaacaacactaaaggttcactgcctattaatgtcatagtttttgatggcaagtccaaatgcgacgagtctgcttctaagtctgcttctgtgtactacagtcagctgatgtgccaacctattctgttgcttgaccaagctcttgtatcagacgttggagatagtactgaagtttccgttaagatgtttgatgcttatgtcgacaccttttcagcaacttttagtgttcctatggaaaaacttaaggcacttgttgctacagctcacagcgagttagcaaagggtgtagctttagatggtgtcctttctacattcgtgtcagctgcccgacaaggtgttgttgataccgatgttgacacaaaggatgttattgaatgtctcaaactttcacatcactctgacttagaagtgacaggtgacagttgtaacaatttcatgctcacctataataaggttgaaaacatgacgcccagagatcttggcgcatgtattgactgtaatgcaaggcatatcaatgcccaagtagcaaaaagtcacaatgtttcactcatctggaatgtaaaagactacatgtctttatctgaacagctgcgtaaacaaattcgtagtgctgccaagaagaacaacataccttttagactaacttgtgctacaactagacaggttgtcaatgtcataactactaaaatctcactcaagggtggtaagattgttagtacttgttttaaacttatgcttaaggccacattattgtgcgttcttgctgcattggtttgttatatcgttatgccagtacatacattgtcaatccatgatggttacacaaatgaaatcattggttacaaagccattcaggatggtgtcactcgtgacatcatttctactgatgattgttttgcaaataaacatgctggttttgacgcatggtttagccagcgtggtggttcatacaaaaatgacaaaagctgccctgtagtagctgctatcattacaagagagattggtttcatagtgcctggcttaccgggtactgtgctgagagcaatcaatggtgacttcttgcattttctacctcgtgtttttagtgctgttggcaacatttgctacacaccttccaaactcattgagtatagtgattttgctacctctgcttgcgttcttgctgctgagtgtacaatttttaaggatgctatgggcaaacctgtgccatattgttatgacactaatttgctagagggttctatttcttatagtgagcttcgtccagacactcgttatgtgcttatggatggttccatcatacagtttcctaacacttacctggagggttctgttagagtagtaacaacttttgatgctgagtactgtagacatggtacatgcgaaaggtcagaagtaggtatttgcctatctaccagtggtagatgggttcttaataatgagcattacagagctctatcaggagttttctgtggtgttgatgcgatgaatctcatagctaacatctttactcctcttgtgcaacctgtgggtgctttagatgtgtctgcttcagtagtggctggtggtattattgccatattggtgacttgtgctgcctactactttatgaaattcagacgtgtttttggtgagtacaaccatgttgttgctgctaatgcacttttgtttttgatgtctttcactatactctgtctggtaccagcttacagctttctgccgggagtctactcagtcttttacttgtacttgacattctatttcaccaatgatgtttcattcttggctcaccttcaatggtttgccatgttttctcctattgtgcctttttggataacagcaatctatgtattctgtatttctctgaagcactgccattggttctttaacaactatcttaggaaaagagtcatgtttaatggagttacatttagtaccttcgaggaggctgctttgtgtacctttttgctcaacaaggaaatgtacctaaaattgcgtagcgagacactgttgccacttacacagtataacaggtatcttgctctatataacaagtacaagtatttcagtggagccttagatactaccagctatcgtgaagcagcttgctgccacttagcaaaggctctaaatgactttagcaactcaggtgctgatgttctctaccaaccaccacagacatcaatcacttctgctgttctgcagagtggttttaggaaaatggcattcccgtcaggcaaagttgaagggtgcatggtacaagtaacctgtggaactacaactcttaatggattgtggttggatgacacagtatactgtccaagacatgtcatttgcacagcagaagacatgcttaatcctaactatgaagatctgctcattcgcaaatccaaccatagctttcttgttcaggctggcaatgttcaacttcgtgttattggccattctatgcaaaattgtctgcttaggcttaaagttgatacttctaaccctaagacacccaagtataaatttgtccgtatccaacctggtcaaacattttcagttctagcatgctacaatggttcaccatctggtgtttatcagtgtgccatgagacctaatcataccattaaaggttctttccttaatggatcatgtggtagtgttggttttaacattgattatgattgcgtgtctttctgctatatgcatcatatggagcttccaacaggagtacacgctggtactgacttagaaggtaaattctatggtccatttgttgacagacaaactgcacaggctgcaggtacagacacaaccataacattaaatgttttggcatggctgtatgctgctgttatcaatggtgataggtggtttcttaatagattcaccactactttgaatgactttaaccttgtggcaatgaagtacaactatgaacctttgacacaagatcatgttgacatattgggacctctttctgctcaaacaggaattgccgtcttagatatgtgtgctgctttgaaagagctgctgcagaatggtatgaatggtcgtactatccttggtagcactattttagaagatgagtttacaccatttgatgttgttagacaatgctctggtgttaccttccaaggtaagttcaagaaaattgttaagggcactcatcattggatgcttttaactttcttgacatcactattgattcttgttcaaagtacacagtggtcactgtttttctttgtttacgagaatgctttcttgccatttactcttggtattatggcaattgctgcatgtgctatgctgcttgttaagcataagcacgcattcttgtgcttgtttctgttaccttctcttgcaacagttgcttactttaatatggtctacatgcctgctagctgggtgatgcgtatcatgacatggcttgaattggctgacactagcttgtctggttataggcttaaggattgtgttatgtatgcttcagctttagttttgcttattctcatgacagctcgcactgtttatgatgatgctgctagacgtgtttggacactgatgaatgtcattacacttgtttacaaagtctactatggtaatgctttagatcaagctatttccatgtgggccttagttatttctgtaacctctaactattctggtgtcgttacgactatcatgtttttagctagagctatagtgtttgtgtgtgttgagtattacccattgttatttattactggcaacaccttacagtgtatcatgcttgtttattgtttcttaggctattgttgctgctgctactttggccttttctgtttactcaaccgttacttcaggcttactcttggtgtttatgactacttggtctctacacaagaatttaggtatatgaactcccaggggcttttgcctcctaagagtagtattgatgctttcaagcttaacattaagttgttgggtattggaggtaaaccatgtatcaaggttgctactgtacagtctaaaatgtctgacgtaaagtgcacatctgtggtactgctctcggttcttcaacaacttagagtagagtcatcttctaaattgtgggcacaatgtgtacaactccacaatgatattcttcttgcaaaagacacaactgaagctttcgagaagatggtttctcttttgtctgttttgctatccatgcagggtgctgtagacattaataggttgtgcgaggaaatgctcgataaccgtgctactcttcaggctattgcttcagaatttagttctttaccatcatatgccgcttatgccactgcccaggaggcctatgagcaggctgtagctaatggtgattctgaagtcgttctcaaaaagttaaagaaatctttgaatgtggctaaatctgagtttgaccgtgatgctgccatgcaacgcaagttggaaaagatggcagatcaggctatgacccaaatgtacaaacaggcaagatctgaggacaagagggcaaaagtaactagtgctatgcaaacaatgctcttcactatgcttaggaagcttgataatgatgcacttaacaacattatcaacaatgcgcgtgatggttgtgttccactcaacatcataccattgactacagcagccaaactcatggttgttgtccctgattatggtacctacaagaacacttgtgatggtaacacctttacatatgcatctgcactctgggaaatccagcaagttgttgatgcggatagcaagattgttcaacttagtgaaattaacatggacaattcaccaaatttggcttggcctcttattgttacagctctaagagccaactcagctgttaaactacagaataatgaactgagtccagtagcactacgacagatgtcctgtgcggctggtaccacacaaacagcttgtactgatgacaatgcacttgcctactataacaattcgaagggaggtaggtttgtgctggcattactatcagaccaccaagatctcaaatgggctagattccctaagagtgatggtacaggtacaatttacacagaactggaaccaccttgtaggtttgttacagacacaccaaaagggcctaaagtgaaatacttgtacttcatcaaaggcttaaacaacctaaatagaggtatggtgctgggcagtttagctgctacagtacgtcttcaggctggaaatgctacagaagtacctgccaattcaactgtgctttccttctgtgcttttgcagtagaccctgctaaagcatataaggattacctagcaagtggaggacaaccaatcaccaactgtgtgaagatgttgtgtacacacactggtacaggacaggcaattactgtaacaccagaagctaacatggaccaagagtcctttggtggtgcttcatgttgtctgtattgtagatgccacattgaccatccaaatcctaaaggattctgtgacttgaaaggtaagtacgtccaaatacctaccacttgtgctaatgacccagtgggttttacacttagaaacacagtctgtaccgtctgcggaatgtggaaaggttatggctgtagttgtgaccaactccgcgaacccttgatgcagtctgcggatgcatcaacgtttttaaacgggtttgcggtgtaagtgcagcccgtcttacaccgtgcggcacaggcactagtactgatgtcgtctacagggcttttgatatttacaacgaaaaagttgctggttttgcaaagttcctaaaaactaattgctgtcgcttccaggagaaggatgaggaaggcaatttattagactcttactttgtagttaagaggcatactatgtctaactaccaacatgaagagactatttataacttggttaaagattgtccagcggttgctgtccatgactttttcaagtttagagtagatggtgacatggtaccacatatatcacgtcagcgtctaactaaatacacaatggctgatttagtctatgctctacgtcattttgatgagggtaattgtgatacattaaaagaaatactcgtcacatacaattgctgtgatgatgattatttcaataagaaggattggtatgacttcgtagagaatcctgacatcttacgcgtatatgctaacttaggtgagcgtgtacgccaatcattattaaagactgtacaattctgcgatgctatgcgtgatgcaggcattgtaggcgtactgacattagataatcaggatcttaatgggaactggtacgatttcggtgatttcgtacaagtagcaccaggctgcggagttcctattgtggattcatattactcattgctgatgcccatcctcactttgactagggcattggctgctgagtcccatatggatgctgatctcgcaaaaccacttattaagtgggatttgctgaaatatgattttacggaagagagactttgtctcttcgaccgttattttaaatattgggaccagacataccatcccaattgtattaactgtttggatgataggtgtatccttcattgtgcaaactttaatgtgttattttctactgtgtttccacctacaagttttggaccactagtaagaaaaatatttgtagatggtgttccttttgttgtttcaactggataccattttcgtgagttaggagtcgtacataatcaggatgtaaacttacatagctcgcgtctcagtttcaaggaacttttagtgtatgctgctgatccagctatgcatgcagcttctggcaatttattgctagataaacgcactacatgcttttcagtagctgcactaacaaacaatgttgcttttcaaactgtcaaacccggtaattttaataaagacttttatgactttgctgtgtctaaaggtttctttaaggaaggaagttctgttgaactaaaacacttcttctttgctcaggatggcaacgctgctatcagtgattatgactattatcgttataatctgccaacaatgtgtgatatcagacaactcctattcgtagttgaagttgttgataaatactttgattgttacgatggtggctgtattaatgccaaccaagtaatcgttaacaatctggataaatcagctggtttcccatttaataaatggggtaaggctagactttattatgactcaatgagttatgaggatcaagatgcacttttcgcgtatactaagcgtaatgtcatccctactataactcaaatgaatcttaagtatgccattagtgcaaagaatagagctcgcaccgtagctggtgtctctatctgtagtactatgacaaatagacagtttcatcagaaattattgaagtcaatagccgccactagaggagctactgtggtaattggaacaagcaagttttacggtggctggcataatatgttaaaaactgtttacagtgatgtagaaactccacaccttatgggttgggattatccaaaatgtgacagagccatgcctaacatgcttaggataatggcctctcttgttcttgctcgcaaacataacacttgctgtaacttatcacaccgtttctacaggttagctaacgagtgtgcgcaagtattaagtgagatggtcatgtgtggcggctcactatatgttaaaccaggtggaacatcatccggtgatgctacaactgcttatgctaatagtgtctttaacatttgtcaagctgttacagccaatgtaaatgcacttctttcaactgatggtaataagatagctgacaagtatgtccgcaatctacaacacaggctctatgagtgtctctatagaaatagggatgttgatcatgaattcgtggatgagttttacgcttacctgcgtaaacatttctccatgatgattctttctgatgatgccgttgtgtgctataacagtaactatgcggctcaaggtttagtagctagcattaagaactttaaggcagttctttattatcaaaataatgtgttcatgtctgaggcaaaatgttggactgagactgaccttactaaaggacctcacgaattttgctcacagcatacaatgctagttaaacaaggagatgattacgtgtacctgccttacccagatccatcaagaatattaggcgcaggctgttttgtcgatgatattgtcaaaacagatggtacacttatgattgaaaggttcgtgtcactggctattgatgcttacccacttacaaaacatcctaatcaggagtatgctgatgtctttcacttgtatttacaatacattagaaagttacatgatgagcttactggccacatgttggacatgtattccgtaatgctaactaatgataacacctcacggtactgggaacctgagttttatgaggctatgtacacaccacatacagtcttgcaggctgtaggtgcttgtgtattgtgcaattcacagacttcacttcgttgcggtgcctgtattaggagaccattcctatgttgcaagtgctgctatgaccatgtcatttcaacatcacacaaattagtgttgtctgttaatccctatgtttgcaatgccccaggttgtgatgtcactgatgtgacacaactgtatctaggaggtatgagctattattgcaagtcacataagcctcccattagttttccattatgtgctaatggtcaggtttttggtttatacaaaaacacatgtgtaggcagtgacaatgtcactgacttcaatgcgatagcaacatgtgattggactaatgctggcgattacatacttgccaacacttgtactgagagactcaagcttttcgcagcagaaacgctcaaagccactgaggaaacatttaagctgtcatatggtattgccactgtacgcgaagtactctctgacagagaattgcatctttcatgggaggttggaaaacctagaccaccattgaacagaaactatgtctttactggttaccgtgtaactaaaaatagtaaagtacagattggagagtacacctttgaaaaaggtgactatggtgatgctgttgtgtacagaggtactacgacatacaagttgaatgttggtgattactttgtgttgacatctcacactgtaatgccacttagtgcacctactctagtgccacaagagcactatgtgagaattactggcttgtacccaacactcaacatctcagatgagttttctagcaatgttgcaaattatcaaaaggtcggcatgcaaaagtactctacactccaaggaccacctggtactggtaagagtcattttgccatcggacttgctctctattacccatctgctcgcatagtgtatacggcatgctctcatgcagctgttgatgccctatgtgaaaaggcattaaaatatttgcccatagataaatgtagtagaatcatacctgcgcgtgcgcgcgtagagtgttttgataaattcaaagtgaattcaacactagaacagtatgttttctgcactgtaaatgcattgccagaaacaactgctgacattgtagtctttgatgaaatctctatggctactaattatgacttgagtgttgtcaatgctagacttcgtgcaaaacactacgtctatattggcgatcctgctcaattaccagccccccgcacattgctgactaaaggcacactagaaccagaatattttaattcagtgtgcagacttatgaaaacaataggtccagacatgttccttggaacttgtcgccgttgtcctgctgaaattgttgacactgtgagtgctttagtttatgacaataagctaaaagcacacaaggataagtcagctcaatgcttcaaaatgttctacaaaggtgttattacacatgatgtttcatctgcaatcaacagacctcaaataggcgttgtaagagaatttcttacacgcaatcctgcttggagaaaagctgtttttatctcaccttataattcacagaacgctgtagcttcaaaaatcttaggattgcctacgcagactgttgattcatcacagggttctgaatatgactatgtcatattcacacaaactactgaaacagcacactcttgtaatgtcaaccgcttcaatgtggctatcacaagggcaaaaattggcattttgtgcataatgtctgatagagatctttatgacaaactgcaatttacaagtctagaaataccacgtcgcaatgtggctacattacaagcagaaaatgtaactggactttttaaggactgtagtaagatcattactggtcttcatcctacacaggcacctacacacctcagcgttgatataaagttcaagactgaaggattatgtgttgacataccaggcataccaaaggacatgacctaccgtagactcatctctatgatgggtttcaaaatgaattaccaagtcaatggttaccctaatatgtttatcacccgcgaagaagctattcgtcacgttcgtgcgtggattggctttgatgtagagggctgtcatgcaactagagatgctgtgggtactaacctacctctccagctaggattttctacaggtgttaacttagtagctgtaccgactggttatgttgacactgaaaataacacagaattcaccagagttaatgcaaaacctccaccaggtgaccagtttaaacatcttataccactcatgtataaaggcttgccctggaatgtagtgcgtattaagatagtacaaatgctcagtgatacactgaaaggattgtcagacagagtcgtgttcgtcctttgggcgcatggctttgagcttacatcaatgaagtactttgtcaagattggacctgaaagaacgtgttgtctgtgtgacaaacgtgcaacttgcttttctacttcatcagatacttatgcctgctggaatcattctgtgggttttgactatgtctataacccatttatgattgatgttcagcagtggggctttacgggtaaccttcagagtaaccatgaccaacattgccaggtacatggaaatgcacatgtggctagttgtgatgctatcatgactagatgtttagcagtccatgagtgctttgttaagcgcgttgattggtctgttgaataccctattataggagatgaactgagggttaattctgcttgcagaaaagtacaacacatggttgtgaagtctgcattgcttgctgataagtttccagttcttcatgacattggaaatccaaaggctatcaagtgtgtgcctcaggctgaagtagaatggaagttctacgatgctcagccatgtagtgacaaagcttacaaaatagaggaactcttctattcttatgctatacatcacgataaattcactgatggtgtttgtttgttttggaattgtaacgttgatcgttacccagccaatgcaattgtgtgtaggtttgacacaagagtcttgtcaaacttgaacttaccaggctgtgatggtggtagtttgtatgtgaataagcatgcattccacactccagctttcgataaaagtgcatttactaatttaaagcaattgcctttcttttactattctgatagtccttgtgagtctcatggcaaacaagtagtgtcggatattgattatgttccactcaaatctgctacgtgtattacacgatgcaatttaggtggtgctgtttgcagacaccatgcaaatgagtaccgacagtacttggatgcatataatatgatgatttctgctggatttagcctatggatttacaaacaatttgatacttataacctgtggaatacatttaccaggttacagagtttagaaaatgtggcttataatgttgttaataaaggacactttgatggacacgccggcgaagcacctgtttccatcattaataatgctgtttacacaaaggtagatggtattgatgtggagatctttgaaaataagacaacacttcctgttaatgttgcatttgagctttgggctaagcgtaacattaaaccagtgccagagattaagatactcaataatttgggtgttgatatcgctgctaatactgtaatctgggactacaaaagagaagccccagcacatgtatctacaataggtgtctgcacaatgactgacattgccaagaaacctactgagagtgcttgttcttcacttactgtcttgtttgatggtagagtggaaggacaggtagacctttttagaaacgcccgtaatggtgttttaataacagaaggttcagtcaaaggtctaacaccttcaaagggaccagcacaagctagcgtcaatggagtcacattaattggagaatcagtaaaaacacagtttaactactttaagaaagtagacggcattattcaacagttgcctgaaacctactttactcagagcagagacttagaggattttaagcccagatcacaaatggaaactgactttctcgagctcgctatggatgaattcatacagcgatataagctcgagggctatgccttcgaacacatcgtttatggagatttcagtcatggacaacttggcggtcttcatttaatgataggcttagccaagcgctcacaagattcaccacttaaattagaggattttatccctatggacagcacagtgaaaaattacttcataacagatgcgcaaacaggttcatcaaaatgtgtgtgttctgtgattgatcttttacttgatgactttgtcgagataataaagtcacaagatttgtcagtgatttcaaaagtggtcaaggttacaattgactatgctgaaatttcattcatgctttggtgtaaggatggacatgttgaaaccttctacccaaaactacaagcaagtcaagcgtggcaaccaggtgttgcgatgcctaacttgtacaagatgcaaagaatgcttcttgaaaagtgtgaccttcagaattatggtgaaaatgctgttataccaaaaggaataatgatgaatgtcgcaaagtatactcaactgtgtcaatacttaaatacacttactttagctgtaccctacaacatgagagttattcactttggtgctggctctgataaaggagttgcaccaggtacagctgtgctcagacaatggttgccaactggcacactacttgtcgattcagatcttaatgacttcgtctccgacgcagattctactttaattggagactgtgcaacagtacatacggctaataaatgggaccttattattagcgatatgtatgaccctaggaccaaacatgtgacaaaagagaatgactctaaagaagggtttttcacttatctgtgtggatttataaagcaaaaactagccctgggtggttctatagctgtaaagataacagagcattcttggaatgctgacctttacaagcttatgggccatttctcatggtggacagcttttgttacaaatgtaaatgcatcatcatcggaagcatttttaattggggctaactatcttggcaagccgaaggaacaaattgatggctataccatgcatgctaactacattttctggaggaacacaaatcctatccagttgtcttcctattcactctttgacatgagcaaatttcctcttaaattaagaggaactgctgtaatgtctcttaaggagaatcaaatcaatgatatgatttattctcttctggaaaaaggtaggcttatcattagagaaaacaacagagttgtggtttcaagtgatattcttgttaacaactaaacgaacatgtttattttcttattatttcttactctcactagtggtagtgaccttgaccggtgcaccacttttgatgatgttcaagctcctaattacactcaacatacttcatctatgaggggggtttactatcctgatgaaatttttagatcagacactctttatttaactcaggatttatttcttccattttattctaatgttacagggtttcatactattaatcatacgtttggcaaccctgtcataccttttaaggatggtatttattttgctgccacagagaaatcaaatgttgtccgtggttgggtttttggttctaccatgaacaacaagtcacagtcggtgattattattaacaattctactaatgttgttatacgagcatgtaactttgaattgtgtgacaaccctttctttgctgtttctaaacccatgggtacacagacacatactatgatattcgataatgcatttaattgcactttcgagtacatatctgatgccttttcgcttgatgtttcagaaaagtcaggtaattttaaacacttacgagagtttgtgtttaaaaataaagatgggtttctctatgtttataagggctatcaacctatagatgtagttcgtgatctaccttctggttttaacactttgaaacctatttttaagttgcctcttggtattaacattacaaattttagagccattcttacagccttttcacctgctcaagacatttggggcacgtcagctgcagcctattttgttggctatttaaagccaactacatttatgctcaagtatgatgaaaatggtacaatcacagatgctgttgattgttctcaaaatccacttgctgaactcaaatgctctgttaagagctttgagattgacaaaggaatttaccagacctctaatttcagggttgttccctcaggagatgttgtgagattccctaatattacaaacttgtgtccttttggagaggtttttaatgctactaaattcccttctgtctatgcatgggagagaaaaaaaatttctaattgtgttgctgattactctgtgctctacaactcaacatttttttcaacctttaagtgctatggcgtttctgccactaagttgaatgatctttgcttctccaatgtctatgcagattcttttgtagtcaagggagatgatgtaagacaaatagcgccaggacaaactggtgttattgctgattataattataaattgccagatgatttcatgggttgtgtccttgcttggaatactaggaacattgatgctacttcaactggtaattataattataaatataggtatcttagacatggcaagcttaggccctttgagagagacatatctaatgtgcctttctcccctgatggcaaaccttgcaccccacctgctcttaattgttattggccattaaatgattatggtttttacaccactactggcattggctaccaaccttacagagttgtagtactttcttttgaacttttaaatgcaccggccacggtttgtggaccaaaattatccactgaccttattaagaaccagtgtgtcaattttaattttaatggactcactggtactggtgtgttaactccttcttcaaagagatttcaaccatttcaacaatttggccgtgatgtttctgatttcactgattccgttcgagatcctaaaacatctgaaatattagacatttcaccttgctcttttgggggtgtaagtgtaattacacctggaacaaatgcttcatctgaagttgctgttctatatcaagatgttaactgcactgatgtttctacagcaattcatgcagatcaactcacaccagcttggcgcatatattctactggaaacaatgtattccagactcaagcaggctgtcttataggagctgagcatgtcgacacttcttatgagtgcgacattcctattggagctggcatttgtgctagttaccatacagtttctttattacgtagtactagccaaaaatctattgtggcttatactatgtctttaggtgctgatagttcaattgcttactctaataacaccattgctatacctactaacttttcaattagcattactacagaagtaatgcctgtttctatggctaaaacctccgtagattgtaatatgtacatctgcggagattctactgaatgtgctaatttgcttctccaatatggtagcttttgcacacaactaaatcgtgcactctcaggtattgctgctgaacaggatcgcaacacacgtgaagtgttcgctcaagtcaaacaaatgtacaaaaccccaactttgaaatattttggtggttttaatttttcacaaatattacctgaccctctaaagccaactaagaggtcttttattgaggacttgctctttaataaggtgacactcgctgatgctggcttcatgaagcaatatggcgaatgcctaggtgatattaatgctagagatctcatttgtgcgcagaagttcaatggacttacagtgttgccacctctgctcactgatgatatgattgctgcctacactgctgctctagttagtggtactgccactgctggatggacatttggtgctggcgctgctcttcaaataccttttgctatgcaaatggcatataggttcaatggcattggagttacccaaaatgttctctatgagaaccaaaaacaaatcgccaaccaatttaacaaggcgattagtcaaattcaagaatcacttacaacaacatcaactgcattgggcaagctgcaagacgttgttaaccagaatgctcaagcattaaacacacttgttaaacaacttagctctaattttggtgcaatttcaagtgtgctaaatgatatcctttcgcgacttgataaagtcgaggcggaggtacaaattgacaggttaattacaggcagacttcaaagccttcaaacctatgtaacacaacaactaatcagggctgctgaaatcagggcttctgctaatcttgctgctactaaaatgtctgagtgtgttcttggacaatcaaaaagagttgacttttgtggaaagggctaccaccttatgtccttcccacaagcagccccgcatggtgttgtcttcctacatgtcacgtatgtgccatcccaggagaggaacttcaccacagcgccagcaatttgtcatgaaggcaaagcatacttccctcgtgaaggtgtttttgtgtttaatggcacttcttggtttattacacagaggaacttcttttctccacaaataattactacagacaatacatttgtctcaggaaattgtgatgtcgttattggcatcattaacaacacagtttatgatcctctgcaacctgagcttgactcattcaaagaagagctggacaagtacttcaaaaatcatacatcaccagatgttgatcttggcgacatttcaggcattaacgcttctgtcgtcaacattcaaaaagaaattgaccgcctcaatgaggtcgctaaaaatttaaatgaatcactcattgaccttcaagaattgggaaaatatgagcaatatattaaatggccttggtatgtttggctcggcttcattgctggactaattgccatcgtcatggttacaatcttgctttgttgcatgactagttgttgcagttgcctcaagggtgcatgctcttgtggttcttgctgcaagtttgatgaggatgactctgagccagttctcaagggtgtcaaattacattacacataaacgaacttatggatttgtttatgagattttttactcttggatcaattactgcacagccagtaaaaattgacaatgcttctcctgcaagtactgttcatgctacagcaacgataccgctacaagcctcactccctttcggatggcttgttattggcgttgcatttcttgctgtttttcagagcgctaccaaaataattgcgctcaataaaagatggcagctagccctttataagggcttccagttcatttgcaatttactgctgctatttgttaccatctattcacatcttttgcttgtcgctgcaggtatggaggcgcaatttttgtacctctatgccttgatatattttctacaatgcatcaacgcatgtagaattattatgagatgttggctttgttggaagtgcaaatccaagaacccattactttatgatgccaactactttgtttgctggcacacacataactatgactactgtataccatataacagtgtcacagatacaattgtcgttactgaaggtgacggcatttcaacaccaaaactcaaagaagactaccaaattggtggttattctgaggataggcactcaggtgttaaagactatgtcgttgtacatggctatttcaccgaagtttactaccagcttgagtctacacaaattactacagacactggtattgaaaatgctacattcttcatctttaacaagcttgttaaagacccaccgaatgtgcaaatacacacaatcgacggctcttcaggagttgctaatccagcaatggatccaatttatgatgagccgacgacgactactagcgtgcctttgtaagcacaagaaagtgagtacgaacttatgtactcattcgtttcggaagaaacaggtacgttaatagttaatagcgtacttctttttcttgctttcgtggtattcttgctagtcacactagccatccttactgcgcttcgattgtgtgcgtactgctgcaatattgttaacgtgagtttagtaaaaccaacggtttacgtctactcgcgtgttaaaaatctgaactcttctgaaggagttcctgatcttctggtctaaacgaactaactattattattattctgtttggaactttaacattgcttatcatggcagacaacggtactattaccgttgaggagcttaaacaactcctggaacaatggaacctagtaataggtttcctattcctagcctggattatgttactacaatttgcctattctaatcggaacaggtttttgtacataataaagcttgttttcctctggctcttgtggccagtaacacttgcttgttttgtgcttgctgctgtctacagaattaattgggtgactggcgggattgcgattgcaatggcttgtattgtaggcttgatgtggcttagctacttcgttgcttccttcaggctgtttgctcgtacccgctcaatgtggtcattcaacccagaaacaaacattcttctcaatgtgcctctccgggggacaattgtgaccagaccgctcatggaaagtgaacttgtcattggtgctgtgatcattcgtggtcacttgcgaatggccggacactccctagggcgctgtgacattaaggacctgccaaaagagatcactgtggctacatcacgaacgctttcttattacaaattaggagcgtcgcagcgtgtaggcactgattcaggttttgctgcatacaaccgctaccgtattggaaactataaattaaatacagaccacgccggtagcaacgacaatattgctttgctagtacagtaagtgacaacagatgtttcatcttgttgacttccaggttacaatagcagggatattgattatcattatgaggactttcaggattgctatttggaatcttgacgttataataagttcaatagtgagacaattatttaagcctctaactaagaagaattattcggagttagatgatgaagaacctatggagttagattatccataaaacgaacatgaaaattattctcttcctgacattgattgtatttacatcttgcgagctatatcactatcaggagtgtgttagaggtacgactgtactactaaaagaaccttgcccatcaggaacatacgagggcaattcaccatttcaccctcttgctgacaataaatttgcactaacttgcactagcacacactttgcttttgcttgtgctgacggtactcgacatacctatcagctgcgtgcaagatcagtttcaccaaaacttttcatcagacaagaggaggttcaacaagagctctactcgccactttttctcattgttgctgctctagtatttttaatactttgcttcaccattaagagaaagacagaatgaatgagctcactttaattgacttctatttgtgctttttagcctttctgctattccttgttttaataatgcttattatattttggttttcactcgaaatccaggatctagaagaaccttgtaccaaagtctaaacgaacatgctcattgttttgacttgtatttctctatgcagttgcatatgcactgtagtacagcgctgtgcatctaataaacctcatgtgcttgaagatccttgtaaggtacaacactaggggtaatacttatagcactgcttggctttgtgctctaggaaaggttttaccttttcatagatggcacactatggttcaaacatgcacacctaatgttactatcaactgtcaagatccagctggtggtgcgcttatagctaggtgttggtaccttcatgaaggtcaccaaactgctgcatttagagacgtacttgttgttttaaataaacgaacaaattaaaatgtctgataatggaccccaatcaaaccaacgtagtgccccccgcattacatttggtggacccacagattcaactgacaataaccagaatggaggacgcaatggggcaaggccaaaacagcgccgaccccaaggtttacccaataatactgcgtcttggttcacagctctcactcagcatggcaaggaggaacttagattccctcgaggccagggcgttccaatcaacaccaatagtggtccagatgaccaaattggctactaccgaagagctacccgacgagttcgtggtggtgacggcaaaatgaaagagctcagccccagatggtacttctattacctaggaactggcccagaagcttcacttccctacggcgctaacaaagaaggcatcgtatgggttgcaactgagggagccttgaatacacccaaagaccacattggcacccgcaatcctaataacaatgctgccaccgtgctacaacttcctcaaggaacaacattgccaaaaggcttctacgcagagggaagcagaggcggcagtcaagcctcttctcgctcctcatcacgtagtcgcggtaattcaagaaattcaactcctggcagcagtaggggaaattctcctgctcgaatggctagcggaggtggtgaaactgccctcgcgctattgctgctagacagattgaaccagcttgagagcaaagtttctggtaaaggccaacaacaacaaggccaaactgtcactaagaaatctgctgctgaggcatctaaaaagcctcgccaaaaacgtactgccacaaaacagtacaacgtcactcaagcatttgggagacgtggtccagaacaaacccaaggaaatttcggggaccaagacctaatcagacaaggaactgattacaaacattggccgcaaattgcacaatttgctccaagtgcctctgcattctttggaatgtcacgcattggcatggaagtcacaccttcgggaacatggctgacttatcatggagccattaaattggatgacaaagatccacaattcaaagacaacgtcatactgctgaacaagcacattgacgcatacaaaacattcccaccaacagagcctaaaaaggacaaaaagaaaaagactgatgaagctcagcctttgccgcagagacaaaagaagcagcccactgtgactcttcttcctgcggctgacatggatgatttctccagacaacttcaaaattccatgagtggagcttctgctgattcaactcaggcataaacactcatgatgaccacacaaggcagatgggctatgtaaacgttttcgcaattccgtttacgatacatagtctactcttgtgcagaatgaattctcgtaactaaacagcacaagtaggtttagttaactttaatctcacatagcaatctttaatcaatgtgtaacattagggaggacttgaaagagccaccacattttcatcgaggccacgcggagtacgatcgagggtacagtgaataatgctagggagagctgcctatatggaagagccctaatgtgtaaaattaattttagtagtgctatccccatgtgattttaatagcttcttaggagaatgac

SEQ ID NO: 67 - DNA, 29711 bp, Coronavirus
tacccaggaaaagccaaccaacctcgatctcttgtagatctgttctctaaacgaactttaaaatctgtgtagctgtcgctcggctgcatgcctagtgcacctacgcagtataaacaataataaattttactgtcgttgacaagaaacgagtaactcgtccctcttctgcagactgcttacggtttcgtccgtgttgcagtcgatcatcagcatacctaggtttcgtccgggtgtgaccgaaaggtaagatggagagccttgttcttggtgtcaacgagaaaacacacgtccaactcagtttgcctgtccttcaggttagagacgtgctagtgcgtggcttcggggactctgtggaagaggccctatcggaggcacgtgaacacctcaaaaatggcacttgtggtctagtagagctggaaaaaggcgtactgccccagcttgaacagccctatgtgttcattaaacgttctgatgccttaagcaccaatcacggccacaaggtcgttgagctggttgcagaaatggacggcattcagtacggtcgtagcggtataacactgggagtactcgtgccacatgtgggcgaaaccccaattgcataccgcaatgttcttcttcgtaagaacggtaataagggagccggtggtcatagctatggcatcgatctaaagtcttatgacttaggtgacgagcttggcactgatcccattgaagattatgaacaaaactggaacactaagcatggcagtggtgcactccgtgaactcactcgtgagctcaatggaggtgcagtcactcgctatgtcgacaacaatttctgtggcccagatgggtaccctcttgattgcatcaaagattttctcgcacgcgcgggcaagtcaatgtgcactctttccgaacaacttgattacatcgagtcgaagagaggtgtctactgctgccgtgaccatgagcatgaaattgcctggttcactgagcgctctgataagagctacgagcaccagacacccttcgaaattaagagtgccaagaaatttgacactttcaaaggggaatgcccaaagtttgtgtttcctcttaactcaaaagtcaaagtcattcaaccacgtgttgaaaagaaaaagactgagggtttcatggggcgtatacgctctgtgtaccctgttgcatctccacaggagtgtaacaatatgcacttgtctaccttgatgaaatgtaatcattgcgatgaagtttcatggcagacgtgcgactttctgaaagccacttgtgaacattgtggcactgaaaatttagttattgaaggacctactacatgtgggtacctacctactaatgctgtagtgaaaatgccatgtcctgcctgtcaagacccagagattggacctgagcatagtgttgcagattatcacaaccactcaaacattgaaactcgactccgcaagggaggtaggactagatgttttggaggctgtgtgtttgcctatgttggctgctataataagcgtgcctactgggttcctcgtgctagtgctgatattggctcaggccatactggcattactggtgacaatgtggagaccttgaatgaggatctccttgagatactgagtcgtgaacgtgttaacattaacattgttggcgattttcatttgaatgaagaggttgccatcattttggcatctttctctgcttctacaagtgcctttattgacactataaagagtcttgattacaagtctttcaaaaccattgttgagtcctgcggtaactataaagttaccaagggaaagcccgtaaaaggtgcttggaacattggacaacagagatcagttttaacaccactgtgtggttttccctcacaggctgctggtgttatcagatcaatttttgcgcgcacacttgatgcagcaaaccactcaattcctgatttgcaaagagcagctgtcaccatacttgatggtatttctgaacagtcattacgtcttgtcgacgccatggtttatacttcagacctgctcaccaacagtgtcattattatggcatatgtaactggtggtcttgtacaacagacttctcagtggttgtctaatcttttgggcactactgttgaaaaactcaggcctatctttgaatggattgaggcgaaacttagtgcaggagttgaatttctcaaggatgcttgggagattctcaaatttctcattacaggtgtttttgacatcgtcaagggtcaaatacaggttgcttcagataacatcaaggattgtgtaaaatgcttcattgatgttgttaacaaggcactcgaaatgtgcattgatcaagtcactatcgctggcgcaaagttgcgatcactcaacttaggtgaagtcttcatcgctcaaagcaagggactttaccgtcagtgtatacgtggcaaggagcagctgcaactactcatgcctcttaaggcaccaaaagaagtaacctttcttgaaggtgattcacatgacacagtacttacctctgaggaggttgttctcaagaacggtgaactcgaagcactcgagacgcccgttgatagcttcacaaatggagctatcgttggcacaccagtctgtgtaaatggcctcatgctcttagagattaaggacaaagaacaatactgcgcattgtctcctggtttactggctacaaacaatgtctttcgcttaaaagggggtgcaccaattaaaggtgtaacctttggagaagatactgtttgggaagttcaaggttacaagaatgtgagaatcacatttgagcttgatgaacgtgttgacaaagtgcttaatgaaaagtgctctgtctacactgttgaatccggtaccgaagttactgagtttgcatgtgttgtagcagaggctgttgtgaagactttacaaccagtttctgatctccttaccaacatgggtattgatcttgatgagtggagtgtagctacattctacttatttgatgatgctggtgaagaaaacttttcatcacgtatgtattgttccttttaccctccagatgaggaagaagaggacgatgcagagtgtgaggaagaagaaattgatgaaacctgtgaacatgagtacggtacagaggatgattatcaaggtctccctctggaatttggtgcctcagctgaaacagttcgagttgaggaagaagaagaggaagactggctggatgatactactgagcaatcagagattgagccagaaccagaacctacacctgaagaaccagttaatcagtttactggttatttaaaacttactgacaatgttgccattaaatgtgttgacatcgttaaggaggcacaaagtgctaatcctatggtgattgtaaatgctgctaacatacacctgaaacatggtggtggtgtagcaggtgcactcaacaaggcaaccaatggtgccatgcaaaaggagagtgatgattacattaagctaaatggccctcttacagtaggagggtcttgtttgctttctggacataatcttgctaagaagtgtctgcatgttgttggacctaacctaaatgcaggtgaggacatccagcttcttaaggcagcatatgaaaatttcaattcacaggacatcttacttgcaccattgttgtcagcaggcatatttggtgctaaaccacttcagtctttacaagtgtgcgtgcagacggttcgtacacaggtttatattgcagtcaatgacaaagctctttatgagcaggttgtcatggattatcttgataacctgaagcctagagtggaagcacctaaacaagaggagccaccaaacacagaagattccaaaactgaggagaaatctgtcgtacagaagcctgtcgatgtgaagccaaaaattaaggcctgcattgatgaggttaccacaacactggaagaaactaagtttcttaccaataagttactcttgtttgctgatatcaatggtaagctttaccatgattctcagaacatgcttagaggtgaagatatgtctttccttgagaaggatgcaccttacatggtaggtgatgttatcactagtggtgatatcacttgtgttgtaataccctccaaaaaggctggtggcactactgagatgctctcaagagctttgaagaaagtgccagttgatgagtatataaccacgtaccctggacaaggatgtgctggttatacacttgaggaagctaagactgctcttaagaaatgcaaatctgcattttatgtactaccttcagaagcacctaatgctaaggaagagattctaggaactgtatcctggaatttgagagaaatgcttgctcatgctgaagagacaagaaaattaatgcctatatgcatggatgttagagccataatggcaaccatccaacgtaagtataaaggaattaaaattcaagagggcatcgttgactatggtgtccgattcttcttttatactagtaaagagcctgtagcttctattattacgaagctgaactctctaaatgagccgcttgtcacaatgccaattggttatgtgacacatggttttaatcttgaagaggctgcgcgctgtatgcgttctcttaaagctcctgccgtagtgtcagtatcatcaccagatgctgttactacatataatggatacctcacttcgtcatcaaagacatctgaggagcactttgtagaaacagtttctttggctggctcttacagagattggtcctattcaggacagcgtacagagttaggtgttgaatttcttaagcgtggtgacaaaattgtgtaccacactctggagagccccgtcgagtttcatcttgacggtgaggttctttcacttgacaaactaaagagtctcttatccctgcgggaggttaagactataaaagtgttcacaactgtggacaacactaatctccacacacagcttgtggatatgtctatgacatatggacagcagtttggtccaacatacttggatggtgctgatgttacaaaaattaaacctcatgtaaatcatgagggtaagactttctttgtactacctagtgatgacacactacgtagtgaagctttcgagtactaccatactcttgatgagagttttcttggtaggtacatgtctgctttaaaccacacaaagaaatggaaatttcctcaagttggtggtttaacttcaattaaatgggctgataacaattgttatttgtctagtgttttattagcacttcaacagcttgaagtcaaattcaatgcaccagcacttcaagaggcttattatagagcccgtgctggtgatgctgctaacttttgtgcactcatactcgcttacagtaataaaactgttggcgagcttggtgatgtcagagaaactatgacccatcttctacagcatgctaatttggaatctgcaaagcgagttcttaatgtggtgtgtaaacattgtggtcagaaaactactaccttaacgggtgtagaagctgtgatgtatatgggtactctatcttatgataatcttaagacaggtgtttccattccatgtgtgtgtggtcgtgatgctacacaatatctagtacaacaagagtcttcttttgttatgatgtctgcaccacctgctgagtataaattacagcaaggtacattcttatgtgcgaatgagtacactggtaactatcagtgtggtcattacactcatataactgctaaggagaccctctatcgtattgacggagctcaccttacaaagatgtcagagtacaaaggaccagtgactgatgttttctacaaggaaacatcttacactacaaccatcaagcctgtgtcgtataaactcgatggagttacttacacagagattgaaccaaaattggatgggtattataaaaaggataatgcttactatacagagcagcctatagaccttgtaccaactcaaccattaccaaatgcgagttttgataatttcaaactcacatgttctaacacaaaatttgctgatgatttaaatcaaatgacaggcttcacaaagccagcttcacgagagctatctgtcacattcttcccagacttgaatggcgatgtagtggctattgactatagacactattcagcgagtttcaagaaaggtgctaaattactgcataagccaattgtttggcacattaaccaggctacaaccaagacaacgttcaaaccaaacacttggtgtttacgttgtctttggagtacaaagccagtagatacttcaaattcatttgaagttctggcagtagaagacacacaaggaatggacaatcttgcttgtgaaagtcaacaacccacctctgaagaagtagtggaaaatcctaccatacagaaggaagtcatagagtgtgacgtgaaaactaccgaagttgtaggcaatgtcatacttaaaccatcagatgaaggtgttaaagtaacacaagagttaggtcatgaggatcttatggctgcttatgtggaaaacacaagcattaccattaagaaacctaatgagctttcactagccttaggtttaaaaacaattgccactcatggtattgctgcaattaatagtgttccttggagtaaaattttggcttatgtcaaaccattcttaggacaagcagcaattacaacatcaaattgcgctaagagattagcacaacgtgtgtttaacaattatatgccttatgtgtttacattattgttccaattgtgtacttttactaaaagtaccaattctagaattagagcttcactacctacaactattgctaaaaatagtgttaagagtgttgctaaattatgtttggatgccggcattaattatgtgaagtcacccaaattttctaaattgttcacaatcgctatgtggctattgttgttaagtatttgcttaggttctctaatctgtgtaactgctgcttttggtgtactcttatctaattttggtgctccttcttattgtaatggcgttagagaattgtatcttaattcgtctaacgttactactatggatttctgtgaaggttcttttccttgcagcatttgtttaagtggattagactcccttgattcttatccagctcttgaaaccattcaggtgacgatttcatcgtacaagctagacttgacaattttaggtctggccgctgagtgggttttggcatatatgttgttcacaaaattcttttatttattaggtctttcagctataatgcaggtgttctttggctattttgctagtcatttcatcagcaattcttggctcatgtggtttatcattagtattgtacaaatggcacccgtttctgcaatggttaggatgtacatcttctttgcttctttctactacatatggaagagctatgttcatatcatggatggttgcacctcttcgacttgcatgatgtgctataagcgcaatcgtgccacacgcgttgagtgtacaactattgttaatggcatgaagagatctttctatgtctatgcaaatggaggccgtggcttctgcaagactcacaattggaattgtctcaattgtgacacattttgcactggtagtacattcattagtgatgaagttgctcgtgatttgtcactccagtttaaaagaccaatcaaccctactgaccagtcatcgtatattgttgatagtgttgctgtgaaaaatggcgcgcttcacctctactttgacaaggctggtcaaaagacctatgagagacatccgctctcccattttgtcaatttagacaatttgagagctaacaacactaaaggttcactgcctattaatgtcatagtttttgatggcaagtccaaatgcgacgagtctgcttctaagtctgcttctgtgtactacagtcagctgatgtgccaacctattctgttgcttgaccaagctcttgtatcagacgttggagatagtactgaagtttccgttaagatgtttgatgcttatgtcgacaccttttcagcaacttttagtgttcctatggaaaaacttaaggcacttgttgctacagctcacagcgagttagcaaagggtgtagctttagatggtgtcctttctacattcgtgtcagctgcccgacaaggtgttgttgataccgatgttgacacaaaggatgttattgaatgtctcaaactttcacatcactctgacttagaagtgacaggtgacagttgtaacaatttcatgctcacctataataaggttgaaaacatgacgcccagagatcttggcgcatgtattgactgtaatgcaaggcatatcaatgcccaagtagcaaaaagtcacaatgtttcactcatctggaatgtaaaagactacatgtctttatctgaacagctgcgtaaacaaattcgtagtgctgccaagaagaacaacataccttttagactaacttgtgctacaactagacaggttgtcaatgtcataactactaaaatctcactcaagggtggtaagattgttagtacttgttttaaacttatgcttaaggccacattattgtgcgttcttgctgcattggtttgttatatcgttatgccagtacatacattgtcaatccatgatggttacacaaatgaaatcattggttacaaagccattcaggatggtgtcactcgtgacatcatttctactgatgattgttttgcaaataaacatgctggttttgacgcatggtttagccagcgtggtggttcatacaaaaatgacaaaagctgccctgtagtagctgctatcattacaagagagattggtttcatagtgcctggcttaccgggtactgtgctgagagcaatcaatggtgacttcttgcattttctacctcgtgtttttagtgctgttggcaacatttgctacacaccttccaaactcattgagtatagtgattttgctacctctgcttgcgttcttgctgctgagtgtacaatttttaaggatgctatgggcaaacctgtgccatattgttatgacactaatttgctagagggttctatttcttatagtgagcttcgtccagacactcgttatgtgcttatggatggttccatcatacagtttcctaacacttacctggagggttctgttagagtagtaacaacttttgatgctgagtactgtagacatggtacatgcgaaaggtcagaagtaggtatttgcctatctaccagtggtagatgggttcttaataatgagcattacagagctctatcaggagttttctgtggtgttgatgcgatgaatctcatagctaacatctttactcctcttgtgcaacctgtgggtgctttagatgtgtctgcttcagtagtggctggtggtattattgccatattggtgacttgtgctgcctactactttatgaaattcagacgtgtttttggtgagtacaaccatgttgttgctgctaatgcacttttgtttttgatgtctttcactatactctgtctggtaccagcttacagctttctgccgggagtctactcagtcttttacttgtacttgacattctatttcaccaatgatgtttcattcttggctcaccttcaatggtttgccatgttttctcctattgtgcctttttggataacagcaatctatgtattctgtatttctctgaagcactgccattggttctttaacaactatcttaggaaaagagtcatgtttaatggagttacatttagtaccttcgaggaggctgctttgtgtacctttttgctcaacaaggaaatgtacctaaaattgcgtagcgagacactgttgccacttacacagtataacaggtatcttgctctatataacaagtacaagtatttcagtggagccttagatactaccagctatcgtgaagcagcttgctgccacttagcaaaggctctaaatgactttagcaactcaggtgctgatgttctctaccaaccaccacagacatcaatcacttctgctgttctgcagagtggttttaggaaaatggcattcccgtcaggcaaagttgaagggtgcatggtacaagtaacctgtggaactacaactcttaatggattgtggttggatgacacagtatactgtccaagacatgtcatttgcacagcagaagacatgcttaatcctaactatgaagatctgctcattcgcaaatccaaccatagctttcttgttcaggctggcaatgttcaacttcgtgttattggccattctatgcaaaattgtctgcttaggcttaaagttgatacttctaaccctaagacacccaagtataaatttgtccgtatccaacctggtcaaacattttcagttctagcatgctacaatggttcaccatctggtgtttatcagtgtgccatgagacctaatcataccattaaaggttctttccttaatggatcatgtggtagtgttggttttaacattgattatgattgcgtgtctttctgctatatgcatcatatggagcttccaacaggagtacacgctggtactgacttagaaggtaaattctatggtccatttgttgacagacaaactgcacaggctgcaggtacagacacaaccataacattaaatgttttggcatggctgtatgctgctgttatcaatggtgataggtggtttcttaatagattcaccactactttgaatgactttaaccttgtggcaatgaagtacaactatgaacctttgacacaagatcatgttgacatattgggacctctttctgctcaaacaggaattgccgtcttagatatgtgtgctgctttgaaagagctgctgcagaatggtatgaatggtcgtactatccttggtagcactattttagaagatgagtttacaccatttgatgttgttagacaatgctctggtgttaccttccaaggtaagttcaagaaaattgttaagggcactcatcattggatgcttttaactttcttgacatcactattgattcttgttcaaagtacacagtggtcactgtttttctttgtttacgagaatgctttcttgccatttactcttggtattatggcaattgctgcatgtgctatgctgcttgttaagcataagcacgcattcttgtgcttgtttctgttaccttctcttgcaacagttgcttactttaatatggtctacatgcctgctagctgggtgatgcgtatcatgacatggcttgaattggctgacactagcttgtctggttataggcttaaggattgtgttatgtatgcttcagctttagttttgcttattctcatgacagctcgcactgtttatgatgatgctgctagacgtgtttggacactgatgaatgtcattacacttgtttacaaagtctactatggtaatgctttagatcaagctatttccatgtgggccttagttatttctgtaacctctaactattctggtgtcgttacgactatcatgtttttagctagagctatagtgtttgtgtgtgttgagtattacccattgttatttattactggcaacaccttacagtgtatcatgcttgtttattgtttcttaggctattgttgctgctgctactttggccttttctgtttactcaaccgttacttcaggcttactcttggtgtttatgactacttggtctctacacaagaatttaggtatatgaactcccaggggcttttgcctcctaagagtagtattgatgctttcaagcttaacattaagttgttgggtattggaggtaaaccatgtatcaaggttgctactgtacagtctaaaatgtctgacgtaaagtgcacatctgtggtactgctctcggttcttcaacaacttagagtagagtcatcttctaaattgtgggcacaatgtgtacaactccacaatgatattcttcttgcaaaagacacaactgaagctttcgagaagatggtttctcttttgtctgttttgctatccatgcagggtgctgtagacattaataggttgtgcgaggaaatgctcgataaccgtgctactcttcaggctattgcttcagaatttagttctttaccatcatatgccgcttatgccactgcccaggaggcctatgagcaggctgtagctaatggtgattctgaagtcgttctcaaaaagttaaagaaatctttgaatgtggctaaatctgagtttgaccgtgatgctgccatgcaacgcaagttggaaaagatggcagatcaggctatgacccaaatgtacaaacaggcaagatctgaggacaagagggcaaaagtaactagtgctatgcaaacaatgctcttcactatgcttaggaagcttgataatgatgcacttaacaacattatcaacaatgcgcgtgatggttgtgttccactcaacatcataccattgactacagcagccaaactcatggttgttgtccctgattatggtacctacaagaacacttgtgatggtaacacctttacatatgcatctgcactctgggaaatccagcaagttgttgatgcggatagcaagattgttcaacttagtgaaattaacatggacaattcaccaaatttggcttggcctcttattgttacagctctaagagccaactcagctgttaaactacagaataatgaactgagtccagtagcactacgacagatgtcctgtgcggctggtaccacacaaacagcttgtactgatgacaatgcacttgcctactataacaattcgaagggaggtaggtttgtgctggcattactatcagaccaccaagatctcaaatgggctagattccctaagagtgatggtacaggtacaatttacacagaactggaaccaccttgtaggtttgttacagacacaccaaaagggcctaaagtgaaatacttgtacttcatcaaaggcttaaacaacctaaatagaggtatggtgctgggcagtttagctgctacagtacgtcttcaggctggaaatgctacagaagtacctgccaattcaactgtgctttccttctgtgcttttgcagtagaccctgctaaagcatataaggattacctagcaagtggaggacaaccaatcaccaactgtgtgaagatgttgtgtacacacactggtacaggacaggcaattactgtaacaccagaagctaacatggaccaagagtcctttggtggtgcttcatgttgtctgtattgtagatgccacattgaccatccaaatcctaaaggattctgtgacttgaaaggtaagtacgtccaaatacctaccacttgtgctaatgacccagtgggttttacacttagaaacacagtctgtaccgtctgcggaatgtggaaaggttatggctgtagttgtgaccaactccgcgaacccttgatgcagtctgcggatgcatcaacgtttttaaacgggtttgcggtgtaagtgcagcccgtcttacaccgtgcggcacaggcactagtactgatgtcgtctacagggcttttgatatttacaacgaaaaagttgctggttttgcaaagttcctaaaaactaattgctgtcgcttccaggagaaggatgaggaaggcaatttattagactcttactttgtagttaagaggcatactatgtctaactaccaacatgaagagactatttataacttggttaaagattgtccagcggttgctgtccatgactttttcaagtttagagtagatggtgacatggtaccacatatatcacgtcagcgtctaactaaatacacaatggctgatttagtctatgctctacgtcattttgatgagggtaattgtgatacattaaaagaaatactcgtcacatacaattgctgtgatgatgattatttcaataagaaggattggtatgacttcgtagagaatcctgacatcttacgcgtatatgctaacttaggtgagcgtgtacgccaatcattattaaagactgtacaattctgcgatgctatgcgtgatgcaggcattgtaggcgtactgacattagataatcaggatcttaatgggaactggtacgatttcggtgatttcgtacaagtagcaccaggctgcggagttcctattgtggattcatattactcattgctgatgcccatcctcactttgactagggcattggctgctgagtcccatatggatgctgatctcgcaaaaccacttattaagtgggatttgctgaaatatgattttacggaagagagactttgtctcttcgaccgttattttaaatattgggaccagacataccatcccaattgtattaactgtttggatgataggtgtatccttcattgtgcaaactttaatgtgttattttctactgtgtttccacctacaagttttggaccactagtaagaaaaatatttgtagatggtgttccttttgttgtttcaactggataccattttcgtgagttaggagtcgtacataatcaggatgtaaacttacatagctcgcgtctcagtttcaaggaacttttagtgtatgctgctgatccagctatgcatgcagcttctggcaatttattgctagataaacgcactacatgcttttcagtagctgcactaacaaacaatgttgcttttcaaactgtcaaacccggtaattttaataaagacttttatgactttgctgtgtctaaaggtttctttaaggaaggaagttctgttgaactaaaacacttcttctttgctcaggatggcaacgctgctatcagtgattatgactattatcgttataatctgccaacaatgtgtgatatcagacaactcctattcgtagttgaagttgttgataaatactttgattgttacgatggtggctgtattaatgccaaccaagtaatcgttaacaatctggataaatcagctggtttcccatttaataaatggggtaaggctagactttattatgactcaatgagttatgaggatcaagatgcacttttcgcgtatactaagcgtaatgtcatccctactataactcaaatgaatcttaagtatgccattagtgcaaagaatagagctcgcaccgtagctggtgtctctatctgtagtactatgacaaatagacagtttcatcagaaattattgaagtcaatagccgccactagaggagctactgtggtaattggaacaagcaagttttacggtggctggcataatatgttaaaaactgtttacagtgatgtagaaactccacaccttatgggttgggattatccaaaatgtgacagagccatgcctaacatgcttaggataatggcctctcttgttcttgctcgcaaacataacacttgctgtaacttatcacaccgtttctacaggttagctaacgagtgtgcgcaagtattaagtgagatggtcatgtgtggcggctcactatatgttaaaccaggtggaacatcatccggtgatgctacaactgcttatgctaatagtgtctttaacatttgtcaagctgttacagccaatgtaaatgcacttctttcaactgatggtaataagatagctgacaagtatgtccgcaatctacaacacaggctctatgagtgtctctatagaaatagggatgttgatcatgaattcgtggatgagttttacgcttacctgcgtaaacatttctccatgatgattctttctgatgatgccgttgtgtgctataacagtaactatgcggctcaaggtttagtagctagcattaagaactttaaggcagttctttattatcaaaataatgtgttcatgtctgaggcaaaatgttggactgagactgaccttactaaaggacctcacgaattttgctcacagcatacaatgctagttaaacaaggagatgattacgtgtacctgccttacccagatccatcaagaatattaggcgcaggctgttttgtcgatgatattgtcaaaacagatggtacacttatgattgaaaggttcgtgtcactggctattgatgcttacccacttacaaaacatcctaatcaggagtatgctgatgtctttcacttgtatttacaatacattagaaagttacatgatgagcttactggccacatgttggacatgtattccgtaatgctaactaatgataacacctcacggtactgggaacctgagttttatgaggctatgtacacaccacatacagtcttgcaggctgtaggtgcttgtgtattgtgcaattcacagacttcacttcgttgcggtgcctgtattaggagaccattcctatgttgcaagtgctgctatgaccatgtcatttcaacatcacacaaattagtgttgtctgttaatccctatgtttgcaatgccccaggttgtgatgtcactgatgtgacacaactgtatctaggaggtatgagctattattgcaagtcacataagcctcccattagttttccattatgtgctaatggtcaggtttttggtttatacaaaaacacatgtgtaggcagtgacaatgtcactgacttcaatgcgatagcaacatgtgattggactaatgctggcgattacatacttgccaacacttgtactgagagactcaagcttttcgcagcagaaacgctcaaagccactgaggaaacatttaagctgtcatatggtattgccactgtacgcgaagtactctctgacagagaattgcatctttcatgggaggttggaaaacctagaccaccattgaacagaaactatgtctttactggttaccgtgtaactaaaaatagtaaagtacagattggagagtacacctttgaaaaaggtgactatggtgatgctgttgtgtacagaggtactacgacatacaagttgaatgttggtgattactttgtgttgacatctcacactgtaatgccacttagtgcacctactctagtgccacaagagcactatgtgagaattactggcttgtacccaacactcaacatctcagatgagttttctagcaatgttgcaaattatcaaaaggtcggcatgcaaaagtactctacactccaaggaccacctggtactggtaagagtcattttgccatcggacttgctctctattacccatctgctcgcatagtgtatacggcatgctctcatgcagctgttgatgccctatgtgaaaaggcattaaaatatttgcccatagataaatgtagtagaatcatacctgcgcgtgcgcgcgtagagtgttttgataaattcaaagtgaattcaacactagaacagtatgttttctgcactgtaaatgcattgccagaaacaactgctgacattgtagtctttgatgaaatctctatggctactaattatgacttgagtgttgtcaatgctagacttcgtgcaaaacactacgtctatattggcgatcctgctcaattaccagccccccgcacattgctgactaaaggcacactagaaccagaatattttaattcagtgtgcagacttatgaaaacaataggtccagacatgttccttggaacttgtcgccgttgtcctgctgaaattgttgacactgtgagtgctttagtttatgacaataagctaaaagcacacaaggataagtcagctcaatgcttcaaaatgttctacaaaggtgttattacacatgatgtttcatctgcaatcaacagacctcaaataggcgttgtaagagaatttcttacacgcaatcctgcttggagaaaagctgtttttatctcaccttataattcacagaacgctgtagcttcaaaaatcttaggattgcctacgcagactgttgattcatcacagggttctgaatatgactatgtcatattcacacaaactactgaaacagcacactcttgtaatgtcaaccgcttcaatgtggctatcacaagggcaaaaattggcattttgtgcataatgtctgatagagatctttatgacaaactgcaatttacaagtctagaaataccacgtcgcaatgtggctacattacaagcagaaaatgtaactggactttttaaggactgtagtaagatcattactggtcttcatcctacacaggcacctacacacctcagcgttgatataaagttcaagactgaaggattatgtgttgacataccaggcataccaaaggacatgacctaccgtagactcatctctatgatgggtttcaaaatgaattaccaagtcaatggttaccctaatatgtttatcacccgcgaagaagctattcgtcacgttcgtgcgtggattggctttgatgtagagggctgtcatgcaactagagatgctgtgggtactaacatacctctccagctaggattttctacaggtgttaacttagtagctgtaccgactggttatgttgacactgaaaataacacagaattcaccagagttaatgcaaaacctccaccaggtgaccagtttaaacatcttataccactcatgtataaaggcttgccctggaatgtagtgcgtattaagatagtacaaatgctcagtgatacactgaaaggattgtcagacagagtcgtgttcgtcctttgggcgcatggctttgagcttacatcaatgaagtactttgtcaagattggacctgaaagaacgtgttgtctgtgtgacaaacgtgcaacttgcttttctacttcatcagatacttatgcctgctggaatcattctgtgggttttgactatgtctataacccatttatgattgatgttcagcagtggggctttacgggtaaccttcagagtaaccatgaccaacattgccaggtacatggaaatgcacatgtggctagttgtgatgctatcatgactagatgtttagcagtccatgagtgctttgttaagcgcgttgattggtctgttgaataccctattataggagatgaactgagggttaattctgcttgcagaaaagtacaacacatggttgtgaagtctgcattgcttgctgataagtttccagttcttcatgacattggaaatccaaaggctatcaagtgtgtgcctcaggctgaagtagaatggaagttctacgatgctcagccatgtagtgacaaagcttacaaaatagaggaactcttctattcttatgctacacatcacgataaattcactgatggtgtttgtttgttttggaattgtaacgttgatcgttacccagccaatgcaattgtgtgtaggtttgacacaagagtcttgtcaaacttgaacttaccaggctgtgatggtggtagtttgtatgtgaataagcatgcattccacactccagctttcgataaaagtgcatttactaatttaaagcaattgcctttcttttactattctgatagtccttgtgagtctcatggcaaacaagtagtgtcggatattgattatgttccactcaaatctgctacgtgtattacacgatgcaatttaggtggtgctgtttgcagacaccatgcaaatgagtaccgacagtacttggatgcatataatatgatgatttctgctggatttagcctatggatttacaaacaatttgatacttataacctgtggaatacatttaccaggttacagagtttagaaaatgtggcttataatgttgttaataaaggacactttgatggacacgccggcgaagcacctgtttccatcattaataatgctgtttacacaaaggtagatggtattgatgtggagatctttgaaaataagacaacacttcctgttaatgttgcatttgagctttgggctaagcgtaacattaaaccagtgccagagattaagatactcaataatttgggtgttgatatcgctgctaatactgtaatctgggactacaaaagagaagccccagcacatgtatctacaataggtgtctgcacaatgactgacattgccaagaaacctactgagagtgcttgttcttcacttactgtcttgtttgatggtagagtggaaggacaggtagacctttttagaaacgcccgtaatggtgttttaataacagaaggttcagtcaaaggtctaacaccttcaaagggaccagcacaagctagcgtcaatggagtcacattaattggagaatcagtaaaaacacagtttaactactttaagaaagtagacggcattattcaacagttgcctgaaacctactttactcagagcagagacttagaggattttaagcccagatcacaaatggaaactgactttctcgagctcgctatggatgaattcatacagcgatataagctcgagggctatgccttcgaacacatcgtttatggagatttcagtcatggacaacttggcggtcttcatttaatgataggcttagccaagcgctcacaagattcaccacttaaattagaggattttatccctatggacagcacagtgaaaaattacttcataacagatgcgcaaacaggttcatcaaaatgtgtgtgttctgtgattgatcttttacttgatgactttgtcgagataataaagtcacaagatttgtcagtgatttcaaaagtggtcaaggttacaattgactatgctgaaatttcattcatgctttggtgtaaggatggacatgttgaaaccttctacccaaaactacaagcaagtcaagcgtggcaaccaggtgttgcgatgcctaacttgtacaagatgcaaagaatgcttcttgaaaagtgtgaccttcagaattatggtgaaaatgctgttataccaaaaggaataatgatgaatgtcgcaaagtatactcaactgtgtcaatacttaaatacacttactttagctgtaccctacaacatgagagttattcactttggtgctggctctgataaaggagttgcaccaggtacagctgtgctcagacaatggttgccaactggcacactacttgtcgattcagatcttaatgacttcgtctccgacgcagattctactttaattggagactgtgcaacagtacatacggctaataaatgggaccttattattagcgatatgtatgaccctaggaccaaacatgtgacaaaagagaatgactctaaagaagggtttttcacttatctgtgtggatttataaagcaaaaactagccctgggtggttctatagctgtaaagataacagagcattcttggaatgctgacctttacaagcttatgggccatttctcatggtggacagcttttgttacaaatgtaaatgcatcatcatcggaagcatttttaattggggctaactatcttggcaagccgaaggaacaaattgatggctataccatgcatgctaactacattttctggaggaacacaaatcctatccagttgtcttcctattcactctttgacatgagcaaatttcctcttaaattaagaggaactgctgtaatgtctcttaaggagaatcaaatcaatgatatgatttattctcttctggaaaaaggtaggcttatcattagagaaaacaacagagttgtggtttcaagtgatattcttgttaacaactaaacgaacatgtttattttcttattatttcttactctcactagtggtagtgaccttgaccggtgcaccacttttgatgatgttcaagctcctaattacactcaacatacttcatctatgaggggggtttactatcctgatgaaatttttagatcagacactctttatttaactcaggatttatttcttccattttattctaatgttacagggtttcatactattaatcatacgtttggcaaccctgtcataccttttaaggatggtatttattttgctgccacagagaaatcaaatgttgtccgtggttgggtttttggttctaccatgaacaacaagtcacagtcggtgattattattaacaattctactaatgttgttatacgagcatgtaactttgaattgtgtgacaaccctttctttgctgtttctaaacccatgggtacacagacacatactatgatattcgataatgcatttaattgcactttcgagtacatatctgatgccttttcgcttgatgtttcagaaaagtcaggtaattttaaacacttacgagagtttgtgtttaaaaataaagatgggtttctctatgtttataagggctatcaacctatagatgtagttcgtgatctaccttctggttttaacactttgaaacctatttttaagttgcctcttggtattaacattacaaattttagagccattcttacagccttttcacctgctcaagacatttggggcacgtcagctgcagcctattttgttggctatttaaagccaactacatttatgctcaagtatgatgaaaatggtacaatcacagatgctgttgattgttctcaaaatccacttgctgaactcaaatgctctgttaagagctttgagattgacaaaggaatttaccagacctctaatttcagggttgttccctcaggagatgttgtgagattccctaatattacaaacttgtgtccttttggagaggtttttaatgctactaaattcccttctgtctatgcatgggagagaaaaaaaatttctaattgtgttgctgattactctgtgctctacaactcaacatttttttcaacctttaagtgctatggcgtttctgccactaagttgaatgatctttgcttctccaatgtctatgcagattcttttgtagtcaagggagatgatgtaagacaaatagcgccaggacaaactggtgttattgctgattataattataaattgccagatgatttcatgggttgtgtccttgcttggaatactaggaacattgatgctacttcaactggtaattataattataaatataggtatcttagacatggcaagcttaggccctttgagagagacatatctaatgtgcctttctcccctgatggcaaaccttgcaccccacctgctcttaattgttattggccattaaatgattatggtttttacaccactactggcattggctaccaaccttacagagttgtagtactttcttttgaacttttaaatgcaccggccacggtttgtggaccaaaattatccactgaccttattaagaaccagtgtgtcaattttaattttaatggactcactggtactggtgtgttaactccttcttcaaagagatttcaaccatttcaacaatttggccgtgatgtttctgatttcactgattctgttcgagatcctaaaacatctgaaatattagacatttcaccttgctcttttgggggtgtaagtgtaattacacctggaacaaatgcttcatctgaagttgctgttctatatcaagatgttaactgcactgatgtttctacagcaattcatgcagatcaactcacaccagcttggcgcatatattctactggaaacaatgtattccagactcaagcaggctgtcttataggagctgagcatgtcgacacttcttatgagtgcgacattcctattggagctggcatttgtgctagttaccatacagtttctttattacgtagtactagccaaaaatctattgtggcttatactatgtctttaggtgctgatagttcaattgcttactctaataacaccattgctatacctactaacttttcaattagcattactacagaagtaatgcctgtttctatggctaaaacctccgtagattgtaatatgtacatctgcggagattctactgaatgtgctaatttgcttctccaatatggtagcttttgcacacaactaaatcgtgcactctcaggtattgctgctgaacaggatcgcaacacacgtgaagtgttcgctcaagtcaaacaaatgtacaaaaccccaactttgaaatattttggtggttttaatttttcacaaatattacctgaccctctaaagccaactaagaggtcttttattgaggacttgctctttaataaggtgacactcgctgatgctggcttcatgaagcaatatggcgaatgcctaggtgatattaatgctagagatctcatttgtgcgcagaagttcaatggacttacagtgttgccacctctgctcactgatgatatgattgctgcctacactgctgctctagttagtggtactgccactgctggatggacatttggtgctggcgctgctcttcaaataccttttgctatgcaaatggcatataggttcaatggcattggagttacccaaaatgttctctatgagaaccaaaaacaaatcgccaaccaatttaacaaggcgattagtcaaattcaagaatcacttacaacaacatcaactgcattgggcaagctgcaagacgttgttaaccagaatgctcaagcattaaacacacttgttaaacaacttagctctaattttggtgcaatttcaagtgtgctaaatgatatcctttcgcgacttgataaagtcgaggcggaggtacaaattgacaggttaattacaggcagacttcaaagccttcaaacctatgtaacacaacaactaatcagggctgctgaaatcagggcttctgctaatcttgctgctactaaaatgtctgagtgtgttcttggacaatcaaaaagagttgacttttgtggaaagggctaccaccttatgtccttcccacaagcagccccgcatggtgttgtcttcctacatgtcacgtatgtgccatcccaggagaggaacttcaccacagcgccagcaatttgtcatgaaggcaaagcatacttccctcgtgaaggtgtttttgtgtttaatggcacttcttggtttattacacagaggaacttcttttctccacaaataattactacagacaatacatttgtctcaggaaattgtgatgtcgttattggcatcattaacaacacagtttatgatcctctgcaacctgagcttgactcattcaaagaagagctggacaagtacttcaaaaatcatacatcaccagatgttgatcttggcgacatttcaggcattaacgcttctgtcgtcaacattcaaaaagaaattgaccgcctcaatgaggtcgctaaaaatttaaatgaatcactcattgaccttcaagaattgggaaaatatgagcaatatattaaatggccttggtatgtttggctcggcttcattgctggactaattgccatcgtcatggttacaatcttgctttgttgcatgactagttgttgcagttgcctcaagggtgcatgctcttgtggttcttgctgcaagtttgatgaggatgactctgagccagttctcaagggtgtcaaattacattacacataaacgaacttatggatttgtttatgagattttttactcttggatcaattactgcacagccagtaaaaattgacaatgcttctcctgcaagtactgttcatgctacagcaacgataccgctacaagcctcactccctttcggatggcttgttattggcgttgcatttcttgctgtttttcagagcgctaccaaaataattgcgctcaataaaagatggcagctagccctttataagggcttccagttcatttgcaatttactgctgctatttgttaccatctattcacatcttttgcttgtcgctgcaggtatggaggcgcaatttttgtacctctatgccttgatatattttctacaatgcatcaacgcatgtagaattattatgagatgttggctttgttggaagtgcaaatccaagaacccattactttatgatgccaactactttgtttgctggcacacacataactatgactactgtataccatataacagtgtcacagatacaattgtcgttactgaaggtgacggcatttcaacaccaaaactcaaagaagactaccaaattggtggttattctgaggataggcactcaggtgttaaagactatgtcgttgtacatggctatttcaccgaagtttactaccagcttgagtctacacaaattactacagacactggtattgaaaatgctacattcttcatctttaacaagcttgttaaagacccaccgaatgtgcaaatacacacaatcgacggctcttcaggagttgctaatccagcaatggatccaatttatgatgagccgacgacgactactagcgtgcctttgtaagcacaagaaagtgagtacgaacttatgtactcattcgtttcggaagaaacaggtacgttaatagttaatagcgtacttctttttcttgctttcgtggtattcttgctagtcacactagccatccttactgcgcttcgattgtgtgcgtactgctgcaatattgttaacgtgagtttagtaaaaccaacggtttacgtctactcgcgtgttaaaaatctgaactcttctgaaggagttcctgatcttctggtctaaacgaactaactattattattattctgtttggaactttaacattgcttatcatggcagacaacggtactattaccgttgaggagcttaaacaactcctggaacaatggaacctagtaataggtttcctattcctagcctggattatgttactacaatttgcctattctaatcggaacaggtttttgtacataataaagcttgttttcctctggctcttgtggccagtaacacttgcttgttttgtgcttgctgctgtctacagaattaattgggtgactggcgggattgcgattgcaatggcttgtattgtaggcttgatgtggcttagctacttcgttgcttccttcaggctgtttgctcgtacccgctcaatgtggtcattcaacccagaaacaaacattcttctcaatgtgcctctccgggggacaattgtgaccagaccgctcatggaaagtgaacttgtcattggtgctgtgatcattcgtggtcacttgcgaatggccggacactccctagggcgctgtgacattaaggacctgccaaaagagatcactgtggctacatcacgaacgctttcttattacaaattaggagcgtcgcagcgtgtaggcactgattcaggttttgctgcatacaaccgctaccgtattggaaactataaattaaatacagaccacgccggtagcaacgacaatattgctttgctagtacagtaagtgacaacagatgtttcatcttgttgacttccaggttacaatagcagagatattgattatcattatgaggactttcaggattgctatttggaatcttgacgttataataagttcaatagtgagacaattatttaagcctctaactaagaagaattattcggagttagatgatgaagaacctatggagttagattatccataaaacgaacatgaaaattattctcttcctgacattgattgtatttacatcttgcgagctatatcactatcaggagtgtgttagaggtacgactgtactactaaaagaaccttgcccatcaggaacatacgagggcaattcaccatttcaccctcttgctgacaataaatttgcactaacttgcactagcacacactttgcttttgcttgtgctgacggtactcgacatacctatcagctgcgtgcaagatcagtttcaccaaaacttttcatcagacaagaggaggttcaacaagagctctactcgccactttttctcattgttgctgctctagtatttttaatactttgcttcaccattaagagaaagacagaatgaatgagctcactttaattgacttctatttgtgctttttagcctttctgctattccttgttttaataatgcttattatattttggttttcactcgaaatccaggatctagaagaaccttgtaccaaagtctaaacgaacatgaaacttctcattgttttgacttgtatttctctatgcagttgcatatgcactgtagtacagcgctgtgcatctaataaacctcatgtgcttgaagatccttgtaaggtacaacactaggggtaatacttatagcactgcttggctttgtgctctaggaaaggttttaccttttcatagatggcacactatggttcaaacatgcacacctaatgttactatcaactgtcaagatccagctggtggtgcgcttatagctaggtgttggtaccttcatgaaggtcaccaaactgctgcatttagagacgtacttgttgttttaaataaacgaacaaattaaaatgtctgataatggaccccaatcaaaccaacgtagtgccccccgcattacatttggtggacccacagattcaactgacaataaccagaatggaggacgcaatggggcaaggccaaaacagcgccgaccccaaggtttacccaataatactgcgtcttggttcacagctctcactcagcatggcaaggaggaacttagattccctcgaggccagggcgttccaatcaacaccaatagtggtccagatgaccaaattggctactaccgaagagctacccgacgagttcgtggtggtgacggcaaaatgaaagagctcagccccagatggtacttctattacctaggaactggcccagaagcttcacttccctacggcgctaacaaagaaggcatcgtatgggttgcaactgagggagccttgaatacacccaaagaccacattggcacccgcaatcctaataacaatgctgccaccgtgctacaacttcctcaaggaacaacattgccaaaaggcttctacgcagagggaagcagaggcggcagtcaagcctcttctcgctcctcatcacgtagtcgcggtaattcaagaaattcaactcctggcagcagtaggggaaattctcctgctcgaatggctagcggaggtggtgaaactgccctcgcgctattgctgctagacagattgaaccagcttgagagcaaagtttctggtaaaggccaacaacaacaaggccaaactgtcactaagaaatctgctgctgaggcatctaaaaagcctcgccaaaaacgtactgccacaaaacagtacaacgtcactcaagcatttgggagacgtggtccagaacaaacccaaggaaatttcggggaccaagacctaatcagacaaggaactgattacaaacattggccgcaaattgcacaatttgctccaagtgcctctgcattctttggaatgtcacgcattggcatggaagtcacaccttcgggaacatggctgacttatcatggagccattaaattggatgacaaagatccacaattcaaagacaacgtcatactgctgaacaagcacattgacgcatacaaaacattcccaccaacagagcctaaaaaggacaaaaagaaaaagactgatgaagctcagcctttgccgcagagacaaaagaagcagcccactgtgactcttcttcctgcggctgacatggatgatttctccagacaacttcaaaattccatgagtggagcttctgctgattcaactcaggcataaacactcatgatgaccacacaaggcagatgggctatgtaaacgttttcgcaattccgtttacgatacatagtctactcttgtgcagaatgaattctcgtaactaaacagcacaagtaggtttagttaactttaatctcacatagcaatctttaatcaatgtgtaacattagggaggacttgaaagagccaccacattttcatcgaggccacgcggagtacgatcgagggtacagtgaataatgctagggagagctgcctatatggaagagccctaatgtgtaaaattaattttagtagtgctatccccatgtgattttaatagcttcttaggagaatgac

SEQ ID NO: 68 - DNA, 29706 bp, Coronavirus
  misc_feature 20688: n = A,T,C or G
tacccaggaaaagccaaccaacctcgatctcttgtagatctgttctctaaacgaactttaaaatctgtgtagctgtcgctcggctgcatgcctagtgcacctacgcagtataaacaataataaattttactgtcgttgacaagaaacgagtaactcgtccctcttctgcagactgcttacggtttcgtccgtgttgcagtcgatcatcagcatacctaggtttcgtccgggtgtgaccgaaaggtaagatggagagccttgttcttggtgtcaacgagaaaacacacgtccaactcagtttgcctgtccttcaggttagagacgtgctagtgcgtggcttcggggactctgtggaagaggccctatcggaggcacgtgaacacctcaaaaatggcacttgtggtctagtagagctggaaaaaggcgtactgccccagcttgaacagccctatgtgttcattaaacgttctgatgccttaagcaccaatcacggccacaaggtcgttgagctggttgcagaaatggacggcattcagtacggtcgtagcggtataacactgggagtactcgtgccacatgtgggcgaaaccccaattgcataccgcaatgttcttcttcgtaagaacggtaataagggagccggtggtcatagctatggcatcgatctaaagtcttatgacttaggtgacgagcttggcactgatcccattgaagattatgaacaaaactggaacactaagcatggcagtggtgcactccgtgaactcactcgtgagctcaatggaggtgcagtcactcgctatgtcgacaacaatttctgtggcccagatgggtaccctcttgattgcatcaaagattttctcgcacgcgcgggcaagtcaatgtgcactctttccgaacaacttgattacatcgagtcgaagagaggtgtctactgctgccgtgaccatgagcatgaaattgcctggttcactgagcgctctgataagagctacgagcaccagacacccttcgaaattaagagtgccaagaaatttgacactttcaaaggggaatgcccaaagtttgtgtttcctcttaactcaaaagtcaaagtcattcaaccacgtgttgaaaagaaaaagactgagggtttcatggggcgtatacgctctgtgtaccctgttgcatctccacaggagtgtaacaatatgcacttgtctaccttgatgaaatgtaatcattgcgatgaagtttcatggcagacgtgcgactttctgaaagccacttgtgaacattgtggcactgaaaatttagttattgaaggacctactacatgtgggtacctacctactaatgctgtagtgaaaatgccatgtcctgcctgtcaagacccagagattggacctgagcatagtgttgcagattatcacaaccactcaaacattgaaactcgactccgcaagggaggtaggactagatgttttggaggctgtgtgtttgcctatgttggctgctataataagcgtgcctactgggttcctcgtgctagtgctgatattggctcaggccatactggcattactggtgacaatgtggagaccttgaatgaggatctccttgagatactgagtcgtgaacgtgttaacattaacattgttggcgattttcatttgaatgaagaggttgccatcattttggcatctttctctgcttctacaagtgcctttattgacactataaagagtcttgattacaagtctttcaaaaccattgttgagtcctgcggtaactataaagttaccaagggaaagcccgtaaaaggtgcttggaacattggacaacagagatcagttttaacaccactgtgtggttttccctcacaggctgctggtgttatcagatcaatttttgcgcgcacacttgatgcagcaaaccactcaattcctgatttgcaaagagcagctgtcaccatacttgatggtatttctgaacagtcattacgtcttgtcgacgccatggtttatacttcagacctgctcaccaacagtgtcattattatggcatatgtaactggtggtcttgtacaacagacttctcagtggttgtctaatcttttgggcactactgttgaaaaactcaggcctatctttgaatggattgaggcgaaacttagtgcaggagttgaatttctcaaggatgcttgggagattctcaaatttctcattacaggtgtttttgacatcgtcaagggtcaaatacaggttgcttcagataacatcaaggattgtgtaaaatgcttcattgatgttgttaacaaggcactcgaaatgtgcattgatcaagtcactatcgctggcgcaaagttgcgatcactcaacttaggtgaagtcttcatcgctcaaagcaagggactttaccgtcagtgtatacgtggcaaggagcagctgcaactactcatgcctcttaaggcaccaaaagaagtaacctttcttgaaggtgattcacatgacacagtacttacctctgaggaggttgttctcaagaacggtgaactcgaagcactcgagacgcccgttgatagcttcacaaatggagctatcgttggcacaccagtctgtgtaaatggcctcatgctcttagagattaaggacaaagaacaatactgcgcattgtctcctggtttactggctacaaacaatgtctttcgcttaaaagggggtgcaccaattaaaggtgtaacctttggagaagatactgtttgggaagttcaaggttacaagaatgtgagaatcacatttgagcttgatgaacgtgttgacaaagtgcttaatgaaaagtgctctgtctacactgttgaatccggtaccgaagttactgagtttgcatgtgttgtagcagaggctgttgtgaagactttacaaccagtttctgatctccttaccaacatgggtattgatcttgatgagtggagtgtagctacattctacttatttgatgatgctggtgaagaaaacttttcatcacgtatgtattgttccttttaccctccagatgaggaagaagaggacgatgcagagtgtgaggaagaagaaattgatgaaacctgtgaacatgagtacggtacagaggatgattatcaaggtctccctctggaatttggtgcctcagctgaaacagttcgagttgaggaagaagaagaggaagactggctggatgatactactgagcaatcagagattgagccagaaccagaacctacacctgaagaaccagttaatcagtttactggttatttaaaacttactgacaatgttgccattaaatgtgttgacatcgttaaggaggcacaaagtgctaatcctatggtgattgtaaatgctgctaacatacacctgaaacatggtggtggtgtagcaggtgcactcaacaaggcaaccaatggtgccatgcaaaaggagagtgatgattacattaagctaaatggccctcttacagtaggagggtcttgtttgctttctggacataatcttgctaagaagtgtctgcatgttgttggacctaacctaaatgcaggtgaggacatccagcttcttaaggcagcatatgaaaatttcaattcacaggacatcttacttgcaccattgttgtcagcaggcatatttggtgctaaaccacttcagtctttacaagtgtgcgtgcagacggttcgtacacaggtttatattgcagtcaatgacaaagctctttatgagcaggttgtcatggattatcttgataacctgaagcctagagtggaagcacctaaacaagaggagccaccaaacacagaagattccaaaactgaggagaaatctgtcgtacagaagcctgtcgatgtgaagccaaaaattaaggcctgcattgatgaggttaccacaacactggaagaaactaagtttcttaccaataagttactcttgtttgctgatatcaatggtaagctttaccatgattctcagaacatgcttagaggtgaagatatgtctttccttgagaaggatgcaccttacatggtaggtgatgttatcactagtggtgatatcacttgtgttgtaataccctccaaaaaggctggtggcactactgagatgctctcaagagctttgaagaaagtgccagttgatgagtatataaccacgtaccctggacaaggatgtgctggttatacacttgaggaagctaagactgctcttaagaaatgcaaatctgcattttatgtactaccttcagaagcacctaatgctaaggaagagattctaggaactgtatcctggaatttgagagaaatgcttgctcatgctgaagagacaagaaaattaatgcctatatgcatggatgttagagccataatggcaaccatccaacgtaagtataaaggaattaaaattcaagagggcatcgttgactatggtgtccgattcttcttttatactagtaaagagcctgtagcttctattattacgaagctgaactctctaaatgagccgcttgtcacaatgccaattggttatgtgacacatggttttaatcttgaagaggctgcgcgctgtatgcgttctcttaaagctcctgccgtagtgtcagtatcatcaccagatgctgttactacatataatggatacctcacttcgtcatcaaagacatctgaggagcactttgtagaaacagtttctttggctggctcttacagagattggtcctattcaggacagcgtacagagttaggtgttgaatttcttaagcgtggtgacaaaattgtgtaccacactctggagagccccgtcgagtttcatcttgacggtgaggttctttcacttgacaaactaaagagtctcttatccctgcgggaggttaagactataaaagtgttcacaactgtggacaacactaatctccacacacagcttgtggatatgtctatgacatatggacagcagtttggtccaacatacttggatggtgctgatgttacaaaaattaaacctcatgtaaatcatgagggtaagactttctttgtactacctagtgatgacacactacgtagtgaagctttcgagtactaccatactcttgatgagagttttcttggtaggtacatgtctgctttaaaccacacaaagaaatggaaatttcctcaagttggtggtttaacttcaattaaatgggctgataacaattgttatttgtctagtgttttattagcacttcaacagcttgaagtcaaattcaatgcaccagcacttcaagaggcttattatagagcccgtgctggtgatgctgctaacttttgtgcactcatactcgcttacagtaataaaactgttggcgagcttggtgatgtcagagaaactatgacccatcttctacagcatgctaatttggaatctgcaaagcgagttcttaatgtggtgtgtaaacattgtggtcagaaaactactaccttaacgggtgtagaagctgtgatgtatatgggtactctatcttatgataatcttaagacaggtgtttccattccatgtgtgtgtggtcgtgatgctacacaatatctagtacaacaagagtcttcttttgttatgatgtctgcaccacctgctgagtataaattacagcaaggtacattcttatgtgcgaatgagtacactggtaactatcagtgtggtcattacactcatataactgctaaggagaccctctatcgtattgacggagctcaccttacaaagatgtcagagtacaaaggaccagtgactgatgttttctacaaggaaacatcttacactacaaccatcaagcctgtgtcgtataaactcgatggagttacttacacagagattgaaccaaaattggatgggtattataaaaaggataatgcttactatacagagcagcctatagaccttgtaccaactcaaccattaccaaatgcgagttttgataatttcaaactcacatgttctaacacaaaatttgctgatgatttaaatcaaatgacaggcttcacaaagccagcttcacgagagctatctgtcacattcttcccagacttgaatggcgatgtagtggctattgactatagacactattcagcgagtttcaagaaaggtgctaaattactgcataagccaattgtttggcacattaaccaggctacaaccaagacaacgttcaaaccaaacacttggtgtttacgttgtctttggagtacaaagccagtagatacttcaaattcatttgaagttctggcagtagaagacacacaaggaatggacaatcttgcttgtgaaagtcaacaacccacctctgaagaagtagtggaaaatcctaccatacagaaggaagtcatagagtgtgacgtgaaaactaccgaagttgtaggcaatgtcatacttaaaccatcagatgaaggtgttaaagtaacacaagagttaggtcatgaggatcttatggctgcttatgtggaaaacacaagcattaccattaagaaacctaatgagctttcactagccttaggtttaaaaacaattgccactcatggtattgctgcaattaatagtgttccttggagtaaaattttggcttatgtcaaaccattcttaggacaagcagcaattacaacatcaaattgcgctaagagattagcacaacgtgtgtttaacaattatatgccttatgtgtttacattattgttccaattgtgtacttttactaaaagtaccaattctagaattagagcttcactacctacaactattgctaaaaatagtgttaagagtgttgctaaattatgtttggatgccggcattaattatgtgaagtcacccaaattttctaaattgttcacaatcgctatgtggctattgttgttaagtatttgcttaggttctctaatctgtgtaactgctgcttttggtgtactcttatctaattttggtgctccttcttattgtaatggcgttagagaattgtatcttaattcgtctaacgttactactatggatttctgtgaaggttcttttccttgcagcatttgtttaagtggattagactcccttgattcttatccagctcttgaaaccattcaggtgacgatttcatcgtacaagctagacttgacaattttaggtctggccgctgagtgggttttggcatatatgttgttcacaaaattcttttatttattaggtctttcagctataatgcaggtgttctttggctattttgctagtcatttcatcagcaattcttggctcatgtggtttatcattagtattgtacaaatggcacccgtttctgcaatggttaggatgtacatcttctttgcttctttctactacatatggaagagctatgttcatatcatggatggttgcacctcttcgacttgcatgatgtgctataagcgcaatcgtgccacacgcgttgagtgtacaactattgttaatggcatgaagagatctttctatgtctatgcaaatggaggccgtggcttctgcaagactcacaattggaattgtctcaattgtgacacattttgcactggtagtacattcattagtgatgaagttgctcgtgatttgtcactccagtttaaaagaccaatcaaccctactgaccagtcatcgtatattgttgatagtgttgctgtgaaaaatggcgcgcttcacctctactttgacaaggctggtcaaaagacctatgagagacatccgctctcccattttgtcaatttagacaatttgagagctaacaacactaaaggttcactgcctattaatgtcatagtttttgatggcaagtccaaatgcgacgagtctgcttctaagtctgcttctgtgtactacagtcagctgatgtgccaacctattctgttgcttgaccaagctcttgtatcagacgttggagatagtactgaagtttccgttaagatgtttgatgcttatgtcgacaccttttcagcaacttttagtgttcctatggaaaaacttaaggcacttgttgctacagctcacagcgagttagcaaagggtgtagctttagatggtgtcctttctacattcgtgtcagctgcccgacaaggtgttgttgataccgatgttgacacaaaggatgttattgaatgtctcaaactttcacatcactctgacttagaagtgacaggtgacagttgtaacaatttcatgctcacctataataaggttgaaaacatgacgcccagagatcttggcgcatgtattgactgtaatgcaaggcatatcaatgcccaagtagcaaaaagtcacaatgtttcactcatctggaatgtaaaagactacatgtctttatctgaacagctgcgtaaacaaattcgtagtgctgccaagaagaacaacataccttttagactaacttgtgctacaactagacaggttgtcaatgtcataactactaaaatctcactcaagggtggtaagattgttagtacttgttttaaacttatgcttaaggccacattattgtgcgttcttgctgcattggtttgttatatcgttatgccagtacatacattgtcaatccatgatggttacacaaatgaaatcattggttacaaagccattcaggatggtgtcactcgtgacatcatttctactgatgattgttttgcaaataaacatgctggttttgacgcatggtttagccagcgtggtggttcatacaaaaatgacaaaagctgccctgtagtagctgctatcattacaagagagattggtttcatagtgcctggcttaccgggtactgtgctgagagcaatcaatggtgacttcttgcattttctacctcgtgtttttagtgctgttggcaacatttgctacacaccttccaaactcattgagtatagtgattttgctacctctgcttgcgttcttgctgctgagtgtacaatttttaaggatgctatgggcaaacctgtgccatattgttatgacactaatttgctagagggttctatttcttatagtgagcttcgtccagacactcgttatgtgcttatggatggttccatcatacagtttcctaacacttacctggagggttctgttagagtagtaacaacttttgatgctgagtactgtagacatggtacatgcgaaaggtcagaagtaggtatttgcctatctaccagtggtagatgggttcttaataatgagcattacagagctctatcaggagttttctgtggtgttgatgcgatgaatctcatagctaacatctttactcctcttgtgcaacctgtgggtgctttagatgtgtctgcttcagtagtggctggtggtattattgccatattggtgacttgtgctgcctactactttatgaaattcagacgtgtttttggtgagtacaaccatgttgttgctgctaatgcacttttgtttttgatgtctttcactatactctgtctggtaccagcttacagctttctgccgggagtctactcagtcttttacttgtacttgacattctatttcaccaatgatgtttcattcttggctcaccttcaatggtttgccatgttttctcctattgtgcctttttggataacagcaatctatgtattctgtatttctctgaagcactgccattggttctttaacaactatcttaggaaaagagtcatgtttaatggagttacatttagtaccttcgaggaggctgctttgtgtacctttttgctcaacaaggaaatgtacctaaaattgcgtagcgagacactgttgccacttacacagtataacaggtatcttgctctatataacaagtacaagtatttcagtggagccttagatactaccagctatcgtgaagcagcttgctgccacttagcaaaggctctaaatgactttagcaactcaggtgctgatgttctctaccaaccaccacagacatcaatcacttctgctgttctgcagagtggttttaggaaaatggcattcccgtcaggcaaagttgaagggtgcatggtacaagtaacctgtggaactacaactcttaatggattgtggttggatgacacagtatactgtccaagacatgtcatttgcacagcagaagacatgcttaatcctaactatgaagatctgctcattcgcaaatccaaccatagctttcttgttcaggctggcaatgttcaacttcgtgttattggccattctatgcaaaattgtctgcttaggcttaaagttgatacttctaaccctaagacacccaagtataaatttgtccgtatccaacctggtcaaacattttcagttctagcatgctacaatggttcaccatctggtgtttatcagtgtgccatgagacctaatcataccattaaaggttctttccttaatggatcatgtggtagtgttggttttaacattgattatgattgcgtgtctttctgctatatgcatcatatggagcttccaacaggagtacacgctggtactgacttagaaggtaaattctatggtccatttgttgacagacaaactgcacaggctgcaggtacagacacaaccataacattaaatgttttggcatggctgtatgctgctgttatcaatggtgataggtggtttcttaatagattcaccactactttgaatgactttaaccttgtggcaatgaagtacaactatgaacctttgacacaagatcatgttgacatattgggacctctttctgctcaaacaggaattgccgtcttagatatgtgtgctgctttgaaagagctgctgcagaatggtatgaatggtcgtactatccttggtagcactattttagaagatgagtttacaccatttgatgttgttagacaatgctctggtgttaccttccaaggtaagttcaagaaaattgttaagggcactcatcattggatgcttttaactttcttgacatcactattgattcttgttcaaagtacacagtggtcactgtttttctttgtttacgagaatgctttcttgccatttactcttggtattatggcaattgctgcatgtgctatgctgcttgttaagcataagcacgcattcttgtgcttgtttctgttaccttctcttgcaacagttgcttactttaatatggtctacatgcctgctagctgggtgatgcgtatcatgacatggcttgaattggctgacactagcttgtctggttataggcttaaggattgtgttatgtatgcttcagctttagttttgcttattctcatgacagctcgcactgtttatgatgatgctgctagacgtgtttggacactgatgaatgtcattacacttgtttacaaagtctactatggtaatgctttagatcaagctatttccatgtgggccttagttatttctgtaacctctaactattctggtgtcgttacgactatcatgtttttagctagagctatagtgtttgtgtgtgttgagtattacccattgttatttattactggcaacaccttacagtgtatcatgcttgtttattgtttcttaggctattgttgctgctgctactttggccttttctgtttactcaaccgttacttcaggcttactcttggtgtttatgactacttggtctctacacaagaatttaggtatatgaactcccaggggcttttgcctcctaagagtagtattgatgctttcaagcttaacattaagttgttgggtattggaggtaaaccatgtatcaaggttgctactgtacagtctaaaatgtctgacgtaaagtgcacatctgtggtactgctctcggttcttcaacaacttagagtagagtcatcttctaaattgtgggcacaatgtgtacaactccacaatgatattcttcttgcaaaagacacaactgaagctttcgagaagatggtttctcttttgtctgttttgctatccatgcagggtgctgtagacattaataggttgtgcgaggaaatgctcgataaccgtgctactcttcaggctattgcttcagaatttagttctttaccatcatatgccgcttatgccactgcccaggaggcctatgagcaggctgtagctaatggtgattctgaagtcgttctcaaaaagttaaagaaatctttgaatgtggctaaatctgagtttgaccgtgatgctgccatgcaacgcaagttggaaaagatggcagatcaggctatgacccaaatgtacaaacaggcaagatctgaggacaagagggcaaaagtaactagtgctatgcaaacaatgctcttcactatgcttaggaagcttgataatgatgcacttaacaacattatcaacaatgcgcgtgatggttgtgttccactcaacatcataccattgactacagcagccaaactcatggttgttgtccctgattatggtacctacaagaacacttgtgatggtaacacctttacatatgcatctgcactctgggaaatccagcaagttgttgatgcggatagcaagattgttcaacttagtgaaattaacatggacaattcaccaaatttggcttggcctcttattgttacagctctaagagccaactcagctgttaaactacagaataatgaactgagtccagtagcactacgacagatgtcctgtgcggctggtaccacacaaacagcttgtactgatgacaatgcacttgcctactataacaattcgaagggaggtaggtttgtgctggcattactatcagaccaccaagatctcaaatgggctagattccctaagagtgatggtacaggtacaatttacacagaactggaaccaccttgtaggtttgttacagacacaccaaaagggcctaaagtgaaatacttgtacttcatcaaaggcttaaacaacctaaatagaggtatggtgctgggcagtttagctgctacagtacgtcttcaggctggaaatgctacagaagtacctgccaattcaactgtgctttccttctgtgcttttgcagtagaccctgctaaagcatataaggattacctagcaagtggaggacaaccaatcaccaactgtgtgaagatgttgtgtacacacactggtacaggacaggcaattactgtaacaccagaagctaacatggaccaagagtcctttggtggtgcttcatgttgtctgtattgtagatgccacattgaccatccaaatcctaaaggattctgtgacttgaaaggtaagtacgtccaaatacctaccacttgtgctaatgacccagtgggttttacacttagaaacacagtctgtaccgtctgcggaatgtggaaaggttatggctgtagttgtgaccaactccgcgaacccttgatgcagtctgcggatgcatcaacgtttttaaacgggtttgcggtgtaagtgcagcccgtcttacaccgtgcggcacaggcactagtactgatgtcgtctacagggcttttgatatttacaacgaaaaagttgctggttttgcaaagttcctaaaaactaattgctgtcgcttccaggagaaggatgaggaaggcaatttattagactcttactttgtagttaagaggcatactatgtctaactaccaacatgaagagactatttataacttggttaaagattgtccagcggttgctgtccatgactttttcaagtttagagtagatggtgacatggtaccacatatatcacgtcagcgtctaactaaatacacaatggctgatttagtctatgctctacgtcattttgatgagggtaattgtgatacattaaaagaaatactcgtcacatacaattgctgtgatgatgattatttcaataagaaggattggtatgacttcgtagagaatcctgacatcttacgcgtatatgctaacttaggtgagcgtgtacgccaatcattattaaagactgtacaattctgcgatgctatgcgtgatgcaggcattgtaggcgtactgacattagataatcaggatcttaatgggaactggtacgatttcggtgatttcgtacaagtagcaccaggctgcggagttcctattgtggattcatattactcattgctgatgcccatcctcactttgactagggcattggctgctgagtcccatatggatgctgatctcgcaaaaccacttattaagtgggatttgctgaaatatgattttacggaagagagactttgtctcttcgaccgttattttaaatattgggaccagacataccatcccaattgtattaactgtttggatgataggtgtatccttcattgtgcaaactttaatgtgttattttctactgtgtttccacctacaagttttggaccactagtaagaaaaatatttgtagatggtgttccttttgttgtttcaactggataccattttcgtgagttaggagtcgtacataatcaggatgtaaacttacatagctcgcgtctcagtttcaaggaacttttagtgtatgctgctgatccagctatgcatgcagcttctggcaatttattgctagataaacgcactacatgcttttcagtagctgcactaacaaacaatgttgcttttcaaactgtcaaacccggtaattttaataaagacttttatgactttgctgtgtctaaaggtttctttaaggaaggaagttctgttgaactaaaacacttcttctttgctcaggatggcaacgctgctatcagtgattatgactattatcgttataatctgccaacaatgtgtgatatcagacaactcctattcgtagttgaagttgttgataaatactttgattgttacgatggtggctgtattaatgccaaccaagtaatcgttaacaatctggataaatcagctggtttcccatttaataaatggggtaaggctagactttattatgactcaatgagttatgaggatcaagatgcacttttcgcgtatactaagcgtaatgtcatccctactataactcaaatgaatcttaagtatgccattagtgcaaagaatagagctcgcaccgtagctggtgtctctatctgtagtactatgacaaatagacagtttcatcagaaattattgaagtcaatagccgccactagaggagctactgtggtaattggaacaagcaagttttacggtggctggcataatatgttaaaaactgtttacagtgatgtagaaactccacaccttatgggttgggattatccaaaatgtgacagagccatgcctaacatgcttaggataatggcctctcttgttcttgctcgcaaacataacacttgctgtaacttatcacaccgtttctacaggttagctaacgagtgtgcgcaagtattaagtgagatggtcatgtgtggcggctcactatatgttaaaccaggtggaacatcatccggtgatgctacaactgcttatgctaatagtgtctttaacatttgtcaagctgttacagccaatgtaaatgcacttctttcaactgatggtaataagatagctgacaagtatgtccgcaatctacaacacaggctctatgagtgtctctatagaaatagggatgttgatcatgaattcgtggatgagttttacgcttacctgcgtaaacatttctccatgatgattctttctgatgatgccgttgtgtgctataacagtaactatgcggctcaaggtttagtagctagcattaagaactttaaggcagttctttattatcaaaataatgtgttcatgtctgaggcaaaatgttggactgagactgaccttactaaaggacctcacgaattttgctcacagcatacaatgctagttaaacaaggagatgattacgtgtacctgccttacccagatccatcaagaatattaggcgcaggctgttttgtcgatgatattgtcaaaacagatggtacacttatgattgaaaggttcgtgtcactggctattgatgcttacccacttacaaaacatcctaatcaggagtatgctgatgtctttcacttgtatttacaatacattagaaagttacatgatgagcttactggccacatgttggacatgtattccgtaatgctaactaatgataacacctcacggtactgggaacctgagttttatgaggctatgtacacaccacatacagtcttgcaggctgtaggtgcttgtgtattgtgcaattcacagacttcacttcgttgcggtgcctgtattaggagaccattcctatgttgcaagtgctgctatgaccatgtcatttcaacatcacacaaattagtgttgtctgttaatccctatgtttgcaatgccccaggttgtgatgtcactgatgtgacacaactgtatctaggaggtatgagctattattgcaagtcacataagcctcccattagttttccattatgtgctaatggtcaggtttttggtttatacaaaaacacatgtgtaggcagtgacaatgtcactgacttcaatgcgatagcaacatgtgattggactaatgctggcgattacatacttgccaacacttgtactgagagactcaagcttttcgcagcagaaacgctcaaagccactgaggaaacatttaagctgtcatatggtattgccactgtacgcgaagtactctctgacagagaattgcatctttcatgggaggttggaaaacctagaccaccattgaacagaaactatgtctttactggttaccgtgtaactaaaaatagtaaagtacagattggagagtacacctttgaaaaaggtgactatggtgatgctgttgtgtacagaggtactacgacatacaagttgaatgttggtgattactttgtgttgacatctcacactgtaatgccacttagtgcacctactctagtgccacaagagcactatgtgagaattactggcttgtacccaacactcaacatctcagatgagttttctagcaatgttgcaaattatcaaaaggtcggcatgcaaaagtactctacactccaaggaccacctggtactggtaagagtcattttgccatcggacttgctctctattacccatctgctcgcatagtgtatacggcatgctctcatgcagctgttgatgccctatgtgaaaaggcattaaaatatttgcccatagataaatgtagtagaatcatacctgcgcgtgcgcgcgtagagtgttttgataaattcaaagtgaattcaacactagaacagtatgttttctgcactgtaaatgcattgccagaaacaactgctgacattgtagtctttgatgaaatctctatggctactaattatgacttgagtgttgtcaatgctagacttcgtgcaaaacactacgtctatattggcgatcctgctcaattaccagccccccgcacattgctgactaaaggcacactagaaccagaatattttaattcagtgtgcagacttatgaaaacaataggtccagacatgttccttggaacttgtcgccgttgtcctgctgaaattgttgacactgtgagtgctttagtttatgacaataagctaaaagcacacaaggataagtcagctcaatgcttcaaaatgttctacaaaggtgttattacacatgatgtttcatctgcaatcaacagacctcaaataggcgttgtaagagaatttcttacacgcaatcctgcttggagaaaagctgtttttatctcaccttataattcacagaacgctgtagcttcaaaaatcttaggattgcctacgcagactgttgattcatcacagggttctgaatatgactatgtcatattcacacaaactactgaaacagcacactcttgtaatgtcaaccgcttcaatgtggctatcacaagggcaaaaattggcattttgtgcataatgtctgatagagatctttatgacaaactgcaatttacaagtctagaaataccacgtcgcaatgtggctacattacaagcagaaaatgtaactggactttttaaggactgtagtaagatcattactggtcttcatcctacacaggcacctacacacctcagcgttgatataaagttcaagactgaaggattatgtgttgacataccaggcataccaaaggacatgacctaccgtagactcatctctatgatgggtttcaaaatgaattaccaagtcaatggttaccctaatatgtttatcacccgcgaagaagctattcgtcacgttcgtgcgtggattggctttgatgtagagggctgtcatgcaactagagatgctgtgggtactaacctacctctccagctaggattttctacaggtgttaacttagtagctgtaccgactggttatgttgacactgaaaataacacagaattcaccagagttaatgcaaaacctccaccaggtgaccagtttaaacatcttataccactcatgtataaaggcttgccctggaatgtagtgcgtattaagatagtacaaatgctcagtgatacactgaaaggattgtcagacagagtcgtgttcgtcctttgggcgcatggctttgagcttacatcaatgaagtactttgtcaagattggacctgaaagaacgtgttgtctgtgtgacaaacgtgcaacttgcttttctacttcatcagatacttatgcctgctggaatcattctgtgggttttgactatgtctataacccatttatgattgatgttcagcagtggggctttacgggtaaccttcagagtaaccatgaccaacattgccaggtacatggaaatgcacatgtggctagttgtgatgctatcatgactagatgtttagcagtccatgagtgctttgttaagcgcgttgattggtctgttgaataccctattataggagatgaactgagggttaattctgcttgcagaaaagtacaacacatggttgtgaagtctgcattgcttgctgataagtttccagttcttcatgacattggaaatccaaaggctatcaagtgtgtgcctcaggctgaagtagaatggaagttctacgatgctcagccatgtagtgacaaagcttacaaaatagaggaactcttctattcttatgctatacatcacgataaattcactgatggtgtttgtttgttttggaattgtaacgttgatcgttacccagccaatgcaattgtgtgtaggtttgacacaagagtcttgtcaaacttgaacttaccaggctgtgatggtggtagtttgtatgtgaataagcatgcattccacactccagctttcgataaaagtgcatttactaatttaaagcaattgcctttcttttactattctgatagtccttgtgagtctcatggcaaacaagtagtgtcggatattgattatgttccactcaaatctgctacgtgtattacacgatgcaatttaggtggtgctgtttgcagacaccatgcaaatgagtaccgacagtacttggatgcatataatatgatgatttctgctggatttagcctatggatttacaaacaatttgatacttataacctgtggaatacatttaccaggttacagagtttagaaaatgtggcttataatgttgttaataaaggacactttgatggacacgccggcgaagcacctgtttccatcattaataatgctgtttacacaaaggtagatggtattgatgtggagatctttgaaaataagacaacacttcctgttaatgttgcatttgagctttgggctaagcgtaacattaaaccagtgccagagattaagatactcaataatttgggtgttgatatcgctgctaatactgtaatctgggactacaaaagagaagccccagcacatgtatctacaataggtgtctgcacaatgactgacattgccaagaaacctactgagagtgcttgttcttcacttactgtcttgtttgatggtagagtggaaggacaggtagacctttttagaaacgcccgtaatggtgttttaataacagaaggttcagtcaaaggtctaacaccttcaaagggaccagcacaagctagcgtcaatggagtcacattaattggagaatcagtaaaaacacagtttaactactttaagaaagtagacggcattattcaacagttgcctgaaacctactttactcagagcagagacttagaggattttaagcccagatcacaaatggaaactgactttctcgagctcgctatggatgaattcatacagcgatataagctcgagggctatgccttcgaacacatcgtttatggagatttcagtcatggacaacttggcggtcttcatttaatgataggcttagccaagcgctcacaagattcaccacttaaattagaggattttatccctatggacagcacagtgaaaaattacttcataacagatgcgcaaacaggttcatcaaaatgtgtgtgttctgtgattgatcttttacttgatgactttgtcgagataataaagtcacaagatttgtcagtgatttcaaaagtggtcaaggttacaattgactatgctgaaatttcattcatgctttggtgtaaggatggacatgttgaaaccttctacccaaaactacaagcaagtcaagcgtggcaaccaggtgttgcgatgcctaacttgtacaagatgcaaagaatgcttcttgaaaagtgtgaccttcagaattatggtgaaaatgctgttataccaaaagnaataatgatgaatgtcgcaaagtatactcaactgtgtcaatacttaaatacacttactttagctgtaccctacaacatgagagttattcactttggtgctggctctgataaaggagttgcaccaggtacagctgtgctcagacaatggttgccaactggcacactacttgtcgattcagatcttaatgacttcgtctccgacgcagattctactttaattggagactgtgcaacagtacatacggctaataaatgggaccttattattagcgatatgtatgaccctaggaccaaacatgtgacaaaagagaatgactctaaagaagggtttttcacttatctgtgtggatttataaagcaaaaactagccctgggtggttctatagctgtaaagataacagagcattcttggaatgctgacctttacaagcttatgggccatttctcatggtggacagcttttgttacaaatgtaaatgcatcatcatcggaagcatttttaattggggctaactatcttggcaagccgaaggaacaaattgatggctataccatgcatgctaactacattttctggaggaacacaaatcctatccagttgtcttcctattcactctttgacatgagcaaatttcctcttaaattaagaggaactgctgtaatgtctcttaaggagaatcaaatcaatgatatgatttattctcttctggaaaaaggtaggcttatcattagagaaaacaacagagttgtggtttcaagtgatattcttgttaacaactaaacgaacatgtttattttcttattatttcttactctcactagtggtagtgaccttgaccggtgcaccacttttgatgatgttcaagctcctaattacactcaacatacttcatctatgaggggggtttactatcctgatgaaatttttagatcagacactctttatttaactcaggatttatttcttccattttattctaatgttacagggtttcatactattaatcatacgtttggcaaccctgtcataccttttaaggatggtatttattttgctgccacagagaaatcaaatgttgtccgtggttgggtttttggttctaccatgaacaacaagtcacagtcggtgattattattaacaattctactaatgttgttatacgagcatgtaactttgaattgtgtgacaaccctttctttgctgtttctaaacccatgggtacacagacacatactatgatattcgataatgcatttaattgcactttcgagtacatatctgatgccttttcgcttgatgtttcagaaaagtcaggtaattttaaacacttacgagagtttgtgtttaaaaataaagatgggtttctctatgtttataagggctatcaacctatagatgtagttcgtgatctaccttctggttttaacactttgaaacctatttttaagttgcctcttggtattaacattacaaattttagagccattcttacagccttttcacctgctcaagacatttggggcacgtcagctgcagcctattttgttggctatttaaagccaactacatttatgctcaagtatgatgaaaatggtacaatcacagatgctgttgattgttctcaaaatccacttgctgaactcaaatgctctgttaagagctttgagattgacaaaggaatttaccagacctctaatttcagggttgttccctcaggagatgttgtgagattccctaatattacaaacttgtgtccttttggagaggtttttaatgctactaaattcccttctgtctatgcatgggagagaaaaaaaatttctaattgtgttgctgattactctgtgctctacaactcaacatttttttcaacctttaagtgctatggcgtttctgccactaagttgaatgatctttgcttctccaatgtctatgcagattcttttgtagtcaagggagatgatgtaagacaaatagcgccaggacaaactggtgttattgctgattataattataaattgccagatgatttcatgggttgtgtccttgcttggaatactaggaacattgatgctacttcaactggtaattataattataaatataggtatcttagacatggcaagcttaggccctttgagagagacatatctaatgtgcctttctcccctgatggcaaaccttgcaccccacctgctcttaattgttattggccattaaatgattatggtttttacaccactactggcattggctaccaaccttacagagttgtagtactttcttttgaacttttaaatgcaccggccacggtttgtggaccaaaattatccactgaccttattaagaaccagtgtgtcaattttaattttaatggactcactggtactggtgtgttaactccttcttcaaagagatttcaaccatttcaacaatttggccgtgatgtttctgatttcactgattccgttcgagatcctaaaacatctgaaatattagacatttcaccttgctcttttgggggtgtaagtgtaattacacctggaacaaatgcttcatctgaagttgctgttctatatcaagatgttaactgcactgatgtttctacagcaattcatgcagatcaactcacaccagcttggcgcatatattctactggaaacaatgtattccagactcaagcaggctgtcttataggagctgagcatgtcgacacttcttatgagtgcgacattcctattggagctggcatttgtgctagttaccatacagtttctttattacgtagtactagccaaaaatctattgtggcttatactatgtctttaggtgctgatagttcaattgcttactctaataacaccattgctatacctactaacttttcaattagcattactacagaagtaatgcctgtttctatggctaaaacctccgtagattgtaatatgtacatctgcggagattctactgaatgtgctaatttgcttctccaatatggtagcttttgcacacaactaaatcgtgcactctcaggtattgctgctgaacaggatcgcaacacacgtgaagtgttcgctcaagtcaaacaaatgtacaaaaccccaactttgaaatattttggtggttttaatttttcacaaatattacctgaccctctaaagccaactaagaggtcttttattgaggacttgctctttaataaggtgacactcgctgatgctggcttcatgaagcaatatggcgaatgcctaggtgatattaatgctagagatctcatttgtgcgcagaagttcaatggacttacagtgttgccacctctgctcactgatgatatgattgctgcctacactgctgctctagttagtggtactgccactgctggatggacatttggtgctggcgctgctcttcaaataccttttgctatgcaaatggcatataggttcaatggcattggagttacccaaaatgttctctatgagaaccaaaaacaaatcgccaaccaatttaacaaggcgattagtcaaattcaagaatcacttacaacaacatcaactgcattgggcaagctgcaagacgttgttaaccagaatgctcaagcattaaacacacttgttaaacaacttagctctaattttggtgcaatttcaagtgtgctaaatgatatcctttcgcgacttgataaagtcgaggcggaggtacaaattgacaggttaattacaggcagacttcaaagccttcaaacctatgtaacacaacaactaatcagggctgctgaaatcagggcttctgctaatcttgctgctactaaaatgtctgagtgtgttcttggacaatcaaaaagagttgacttttgtggaaagggctaccaccttatgtccttcccacaagcagccccgcatggtgttgtcttcctacatgtcacgtatgtgccatcccaggagaggaacttcaccacagcgccagcaatttgtcatgaaggcaaagcatacttccctcgtgaaggtgtttttgtgtttaatggcacttcttggtttattacacagaggaacttcttttctccacaaataattactacagacaatacatttgtctcaggaaattgtgatgtcgttattggcatcattaacaacacagtttatgatcctctgcaacctgagcttgactcattcaaagaagagctggacaagtacttcaaaaatcatacatcaccagatgttgatcttggcgacatttcaggcattaacgcttctgtcgtcaacattcaaaaagaaattgaccgcctcaatgaggtcgctaaaaatttaaatgaatcactcattgaccttcaagaattgggaaaatatgagcaatatattaaatggccttggtatgtttggctcggcttcattgctggactaattgccatcgtcatggttacaatcttgctttgttgcatgactagttgttgcagttgcctcaagggtgcatgctcttgtggttcttgctgcaagtttgatgaggatgactctgagccagttctcaagggtgtcaaattacattacacataaacgaacttatggatttgtttatgagattttttactcttggatcaattactgcacagccagtaaaaattgacaatgcttctcctgcaagtactgttcatgctacagcaacgataccgctacaagcctcactccctttcggatggcttgttattggcgttgcatttcttgctgtttttcagagcgctaccaaaataattgcgctcaataaaagatggcagctagccctttataagggcttccagttcatttgcaatttactgctgctatttgttaccatctattcacatcttttgcttgtcgctgcaggtatggaggcgcaatttttgtacctctatgccttgatatattttctacaatgcatcaacgcatgtagaattattatgagatgttggctttgttggaagtgcaaatccaagaacccattactttatgatgccaactactttgtttgctggcacacacataactatgactactgtataccatataacagtgtcacagatacaattgtcgttactgaaggtgacggcatttcaacaccaaaactcaaagaagactaccaaattggtggttattctgaggataggcactcaggtgttaaagactatgtcgttgtacatggctatttcaccgaagtttactaccagcttgagtctacacaaattactacagacactggtattgaaaatgctacattcttcatctttaacaagcttgttaaagacccaccgaatgtgcaaatacacacaatcgacggctcttcaggagttgctaatccagcaatggatccaatttatgatgagccgacgacgactactagcgtgcctttgtaagcacaagaaagtgagtacgaacttatgtactcattcgtttcggaagaaacaggtacgttaatagttaatagcgtacttctttttcttgctttcgtggtattcttgctagtcacactagccatccttactgcgcttcgattgtgtgcgtactgctgcaatattgttaacgtgagtttagtaaaaccaacggtttacgtctactcgcgtgttaaaaatctgaactcttctgaaggagttcctgatcttctggtctaaacgaactaactattattattattctgtttggaactttaacattgcttatcatggcagacaacggtactattaccgttgaggagcttaaacaactcctggaacaatggaacctagtaataggtttcctattcctagcctggattatgttactacaatttgcctattctaatcggaacaggtttttgtacataataaagcttgttttcctctggctcttgtggccagtaacacttgcttgttttgtgcttgctgctgtctacagaattaattgggtgactggcgggattgcgattgcaatggcttgtattgtaggcttgatgtggcttagctacttcgttgcttccttcaggctgtttgctcgtacccgctcaatgtggtcattcaacccagaaacaaacattcttctcaatgtgcctctccgggggacaattgtgaccagaccgctcatggaaagtgaacttgtcattggtgctgtgatcattcgtggtcacttgcgaatggccggacactccctagggcgctgtgacattaaggacctgccaaaagagatcactgtggctacatcacgaacgctttcttattacaaattaggagcgtcgcagcgtgtaggcactgattcaggttttgctgcatacaaccgctaccgtattggaaactataaattaaatacagaccacgccggtagcaacgacaatattgctttgctagtacagtaagtgacaacagatgtttcatcttgttgacttccaggttacaatagcagagatattgattatcattatgaggactttcaggattgctatttggaatcttgacgttataataagttcaatagtgagacaattatttaagcctctaactaagaagaattattcggagttagatgatgaagaacctatggagttagattatccataaaacgaacatgaaaattattctcttcctgacattgattgtatttacatcttgcgagctatatcactatcaggagtgtgttagaggtacgactgtactactaaaagaaccttgcccatcaggaacatacgagggcaattcaccatttcaccctcttgctgacaataaatttgcactaacttgcactagcacacactttgcttttgcttgtgctgacggtactcgacatacctatcagctgcgtgcaagatcagtttcaccaaaacttttcatcagacaagaggaggttcaacaagagctctactcgccactttttctcattgttgctgctctagtatttttaatactttgcttcaccattaagagaaagacagaatgaatgagctcactttaattgacttctatttgtgctttttagcctttctgctattccttgttttaataatgcttattatattttggttttcactcgaaatccaggatctagaagaaccttgtaccaaagtctaaacgaacatgaaacttctcattgttttgacttgtattttgcagttgcatatgcactgtagtacagcgctgtgcatctaataaacctcatgtgcttgaagatccttgtaaggtacaacactaggggtaatacttatagcactgcttggctttgtgctctaggaaaggttttaccttttcatagatggcacactatggttcaaacatgcacacctaatgttactatcaactgtcaagatccagctggtggtgcgcttatagctaggtgttggtaccttcatgaaggtcaccaaactgctgcatttagagacgtacttgttgttttaaataaacgaacaaattaaaatgtctgataatggaccccaatcaaaccaacgtagtgccccccgcattacatttggtggacccacagattcaactgacaataaccagaatggaggacgcaatggggcaaggccaaaacagcgccgaccccaaggtttacccaataatactgcgtcttggttcacagctctcactcagcatggcaaggaggaacttagattccctcgaggccagggcgttccaatcaacaccaatagtggtccagatgaccaaattggctactaccgaagagctacccgacgagttcgtggtggtgacggcaaaatgaaagagctcagccccagatggtacttctattacctaggaactggcccagaagcttcacttccctacggcgctaacaaagaaggcatcgtatgggttgcaactgagggagccttgaatacacccaaagaccacattggcacccgcaatcctaataacaatgctgccaccgtgctacaacttcctcaaggaacaacattgccaaaaggcttctacgcagagggaagcagaggcggcagtcaagcctcttctcgctcctcatcacgtagtcgcggtaattcaagaaattcaactcctggcagcagtaggggaaattctcctgctcgaatggctagcggaggtggtgaaactgccctcgcgctattgctgctagacagattgaaccagcttgagagcaaagtttctggtaaaggccaacaacaacaaggccaaactgtcactaagaaatctgctgctgaggcatctaaaaagcctcgccaaaaacgtactgccacaaaacagtacaacgtcactcaagcatttgggagacgtggtccagaacaaacccaaggaaatttcggggaccaagacctaatcagacaaggaactgattacaaacattggccgcaaattgcacaatttgctccaagtgcctctgcattctttggaatgtcacgcattggcatggaagtcacaccttcgggaacatggctgacttatcatggagccattaaattggatgacaaagatccacaattcaaagacaacgtcatactgctgaacaagcacattgacgcatacaaaacattcccaccaacagagcctaaaaaggacaaaaagaaaaagactgatgaagctcagcctttgccgcagagacaaaagaagcagcccactgtgactcttcttcctgcggctgacatggatgatttctccagacaacttcaaaattccatgagtggagcttctgctgattcaactcaggcataaacactcatgatgaccacacaaggcagatgggctatgtaaacgttttcgcaattccgtttacgatacatagtctactcttgtgcagaatgaattctcgtaactaaacagcacaagtaggtttagttaactttaatctcacatagcaatctttaatcaatgtgtaacattagggaggacttgaaagagccaccacattttcatcgaggccacgcggagtacgatcgagggtacagtgaataatgctagggagagctgcctatatggaagagccctaatgtgtaaaattaattttagtagtgctatccccatgtgattttaatagcttcttaggagaatgac

SEQ ID NO: 69 - DNA, 29711 bp, Coronavirus
tacccaggaaaagccaaccaacctcgatctcttgtagatctgttctctaaacgaactttaaaatctgtgtagctgtcgctcggctgcatgcctagtgcacctacgcagtataaacaataataaattttactgtcgttgacaagaaacgagtaactcgtccctcttctgcagactgcttacggtttcgtccgtgttgcagtcgatcatcagcatacctaggtttcgtccgggtgtgaccgaaaggtaagatggagagccttgttcttggtgtcaacgagaaaacacacgtccaactcagtttgcctgtccttcaggttagagacgtgctagtgcgtggcttcggggactctgtggaagaggccctatcggaggcacgtgaacacctcaaaaatggcacttgtggtctagtagagctggaaaaaggcgtactgccccagcttgaacagccctatgtgttcattaaacgttctgatgccttaagcaccaatcacggccacaaggtcgttgagctggttgcagaaatggacggcattcagtacggtcgtagcggtataacactgggagtactcgtgccacatgtgggcgaaaccccaattgcataccgcaatgttcttcttcgtaagaacggtaataagggagccggtggtcatagctatggcatcgatctaaagtcttatgacttaggtgacgagcttggcactgatcccattgaagattatgaacaaaactggaacactaagcatggcagtggtgcactccgtgaactcactcgtgagctcaatggaggtgcagtcactcgctatgtcgacaacaatttctgtggcccagatgggtaccctcttgattgcatcaaagattttctcgcacgcgcgggcaagtcaatgtgcactctttccgaacaacttgattacatcgagtcgaagagaggtgtctactgctgccgtgaccatgagcatgaaattgcctggttcactgagcgctctgataagagctacgagcaccagacacccttcgaaattaagagtgccaagaaatttgacactttcaaaggggaatgcccaaagtttgtgtttcctcttaactcaaaagtcaaagtcattcaaccacgtgttgaaaagaaaaagactgagggtttcatggggcgtatacgctctgtgtaccctgttgcatctccacaggagtgtaacaatatgcacttgtctaccttgatgaaatgtaatcattgcgatgaagtttcatggcagacgtgcgactttctgaaagccacttgtgaacattgtggcactgaaaatttagttattgaaggacctactacatgtgggtacctacctactaatgctgtagtgaaaatgccatgtcctgcctgtcaagacccagagattggacctgagcatagtgttgcagattatcacaaccactcaaacattgaaactcgactccgcaagggaggtaggactagatgttttggaggctgtgtgtttgcctatgttggctgctataataagcgtgcctactgggttcctcgtgctagtgctgatattggctcaggccatactggcattactggtgacaatgtggagaccttgaatgaggatctccttgagatactgagtcgtgaacgtgttaacattaacattgttggcgattttcatttgaatgaagaggttgccatcattttggcatctttctctgcttctacaagtgcctttattgacactataaagagtcttgattacaagtctttcaaaaccattgttgagtcctgcggtaactataaagttaccaagggaaagcccgtaaaaggtgcttggaacattggacaacagagatcagttttaacaccactgtgtggttttccctcacaggctgctggtgttatcagatcaatttttgcgcgcacacttgatgcagcaaaccactcaattcctgatttgcaaagagcagctgtcaccatacttgatggtatttctgaacagtcattacgtcttgtcgacgccatggtttatacttcagacctgctcaccaacagtgtcattattatggcatatgtaactggtggtcttgtacaacagacttctcagtggttgtctaatcttttgggcactactgttgaaaaactcaggcctatctttgaatggattgaggcgaaacttagtgcaggagttgaatttctcaaggatgcttgggagattctcaaatttctcattacaggtgtttttgacatcgtcaagggtcaaatacaggttgcttcagataacatcaaggattgtgtaaaatgcttcattgatgttgttaacaaggcactcgaaatgtgcattgatcaagtcactatcgctggcgcaaagttgcgatcactcaacttaggtgaagtcttcatcgctcaaagcaagggactttaccgtcagtgtatacgtggcaaggagcagctgcaactactcatgcctcttaaggcaccaaaagaagtaacctttcttgaaggtgattcacatgacacagtacttacctctgaggaggttgttctcaagaacggtgaactcgaagcactcgagacgcccgttgatagcttcacaaatggagctatcgttggcacaccagtctgtgtaaatggcctcatgctcttagagattaaggacaaagaacaatactgcgcattgtctcctggtttactggctacaaacaatgtctttcgcttaaaagggggtgcaccaattaaaggtgtaacctttggagaagatactgtttgggaagttcaaggttacaagaatgtgagaatcacatttgagcttgatgaacgtgttgacaaagtgcttaatgaaaagtgctctgtctacactgttgaatccggtaccgaagttactgagtttgcatgtgttgtagcagaggctgttgtgaagactttacaaccagtttctgatctccttaccaacatgggtattgatcttgatgagtggagtgtagctacattctacttatttgatgatgctggtgaagaaaacttttcatcacgtatgtattgttccttttaccctccagatgaggaagaagaggacgatgcagagtgtgaggaagaagaaattgatgaaacctgtgaacatgagtacggtacagaggatgattatcaaggtctccctctggaatttggtgcctcagctgaaacagttcgagttgaggaagaagaagaggaagactggctggatgatactactgagcaatcagagattgagccagaaccagaacctacacctgaagaaccagttaatcagtttactggttatttaaaacttactgacaatgttgccattaaatgtgttgacatcgttaaggaggcacaaagtgctaatcctatggtgattgtaaatgctgctaacatacacctgaaacatggtggtggtgtagcaggtgcactcaacaaggcaaccaatggtgccatgcaaaaggagagtgatgattacattaagctaaatggccctcttacagtaggagggtcttgtttgctttctggacataatcttgctaagaagtgtctgcatgttgttggacctaacctaaatgcaggtgaggacatccagcttcttaaggcagcatatgaaaatttcaattcacaggacatcttacttgcaccattgttgtcagcaggcatatttggtgctaaaccacttcagtctttacaagtgtgcgtgcagacggttcgtacacaggtttatattgcagtcaatgacaaagctctttatgagcaggttgtcatggattatcttgataacctgaagcctagagtggaagcacctaaacaagaggagccaccaaacacagaagattccaaaactgaggagaaatctgtcgtacagaagcctgtcgatgtgaagccaaaaattaaggcctgcattgatgaggttaccacaacactggaagaaactaagtttcttaccaataagttactcttgtttgctgatatcaatggtaagctttaccatgattctcagaacatgcttagaggtgaagatatgtctttccttgagaaggatgcaccttacatggtaggtgatgttatcactagtggtgatatcacttgtgttgtaataccctccaaaaaggctggtggcactactgagatgctctcaagagctttgaagaaagtgccagttgatgagtatataaccacgtaccctggacaaggatgtgctggttatacacttgaggaagctaagactgctcttaagaaatgcaaatctgcattttatgtactaccttcagaagcacctaatgctaaggaagagattctaggaactgtatcctggaatttgagagaaatgcttgctcatgctgaagagacaagaaaattaatgcctatatgcatggatgttagagccataatggcaaccatccaacgtaagtataaaggaattaaaattcaagagggcatcgttgactatggtgtccgattcttcttttatactagtaaagagcctgtagcttctattattacgaagctgaactctctaaatgagccgcttgtcacaatgccaattggttatgtgacacatggttttaatcttgaagaggctgcgcgctgtatgcgttctcttaaagctcctgccgtagtgtcagtatcatcaccagatgctgttactacatataatggatacctcacttcgtcatcaaagacatctgaggagcactttgtagaaacagtttctttggctggctcttacagagattggtcctattcaggacagcgtacagagttaggtgttgaatttcttaagcgtggtgacaaaattgtgtaccacactctggagagccccgtcgagtttcatcttgacggtgaggttctttcacttgacaaactaaagagtctcttatccctgcgggaggttaagactataaaagtgttcacaactgtggacaacactaatctccacacacagcttgtggatatgtctatgacatatggacagcagtttggtccaacatacttggatggtgctgatgttacaaaaattaaacctcatgtaaatcatgagggtaagactttctttgtactacctagtgatgacacactacgtagtgaagctttcgagtactaccatactcttgatgagagttttcttggtaggtacatgtctgctttaaaccacacaaagaaatggaaatttcctcaagttggtggtttaacttcaattaaatgggctgataacaattgttatttgtctagtgttttattagcacttcaacagcttgaagtcaaattcaatgcaccagcacttcaagaggcttattatagagcccgtgctggtgatgctgctaacttttgtgcactcatactcgcttacagtaataaaactgttggcgagcttggtgatgtcagagaaactatgacccatcttctacagcatgctaatttggaatctgcaaagcgagttcttaatgtggtgtgtaaacattgtggtcagaaaactactaccttaacgggtgtagaagctgtgatgtatatgggtactctatcttatgataatcttaagacaggtgtttccattccatgtgtgtgtggtcgtgatgctacacaatatctagtacaacaagagtcttcttttgttatgatgtctgcaccacctgctgagtataaattacagcaaggtacattcttatgtgcgaatgagtacactggtaactatcagtgtggtcattacactcatataactgctaaggagaccctctatcgtattgacggagctcaccttacaaagatgtcagagtacaaaggaccagtgactgatgttttctacaaggaaacatcttacactacaaccatcaagcctgtgtcgtataaactcgatggagttacttacacagagattgaaccaaaattggatgggtattataaaaaggataatgcttactatacagagcagcctatagaccttgtaccaactcaaccattaccaaatgcgagttttgataatttcaaactcacatgttctaacacaaaatttgctgatgatttaaatcaaatgacaggcttcacaaagccagcttcacgagagctatctgtcacattcttcccagacttgaatggcgatgtagtggctattgactatagacactattcagcgagtttcaagaaaggtgctaaattactgcataagccaattgtttggcacattaaccaggctacaaccaagacaacgttcaaaccaaacacttggtgtttacgttgtctttggagtacaaagccagtagatacttcaaattcatttgaagttctggcagtagaagacacacaaggaatggacaatcttgcttgtgaaagtcaacaacccacctctgaagaagtagtggaaaatcctaccatacagaaggaagtcatagagtgtgacgtgaaaactaccgaagttgtaggcaatgtcatacttaaaccatcagatgaaggtgttaaagtaacacaagagttaggtcatgaggatcttatggctgcttatgtggaaaacacaagcattaccattaagaaacctaatgagctttcactagccttaggtttaaaaacaattgccactcatggtattgctgcaattaatagtgttccttggagtaaaattttggcttatgtcaaaccattcttaggacaagcagcaattacaacatcaaattgcgctaagagattagcacaacgtgtgtttaacaattatatgccttatgtgtttacattattgttccaattgtgtacttttactaaaagtaccaattctagaattagagcttcactacctacaactattgctaaaaatagtgttaagagtgttgctaaattatgtttggatgccggcattaattatgtgaagtcacccaaattttctaaattgttcacaatcgctatgtggctattgttgttaagtatttgcttaggttctctaatctgtgtaactgctgcttttggtgtactcttatctaattttggtgctccttcttattgtaatggcgttagagaattgtatcttaattcgtctaacgttactactatggatttctgtgaaggttcttttccttgcagcatttgtttaagtggattagactcccttgattcttatccagctcttgaaaccattcaggtgacgatttcatcgtacaagctagacttgacaattttaggtctggccgctgagtgggttttggcatatatgttgttcacaaaattcttttatttattaggtctttcagctataatgcaggtgttctttggctattttgctagtcatttcatcagcaattcttggctcatgtggtttatcattagtattgtacaaatggcacccgtttctgcaatggttaggatgtacatcttctttgcttctttctactacatatggaagagctatgttcatatcatggatggttgcacctcttcgacttgcatgatgtgctataagcgcaatcgtgccacacgcgttgagtgtacaactattgttaatggcatgaagagatctttctatgtctatgcaaatggaggccgtggcttctgcaagactcacaattggaattgtctcaattgtgacacattttgcactggtagtacattcattagtgatgaagttgctcgtgatttgtcactccagtttaaaagaccaatcaaccctactgaccagtcatcgtatattgttgatagtgttgctgtgaaaaatggcgcgcttcacctctactttgacaaggctggtcaaaagacctatgagagacatccgctctcccattttgtcaatttagacaatttgagagctaacaacactaaaggttcactgcctattaatgtcatagtttttgatggcaagtccaaatgcgacgagtctgcttctaagtctgcttctgtgtactacagtcagctgatgtgccaacctattctgttgcttgaccaagctcttgtatcagacgttggagatagtactgaagtttccgttaagatgtttgatgcttatgtcgacaccttttcagcaacttttagtgttcctatggaaaaacttaaggcacttgttgctacagctcacagcgagttagcaaagggtgtagctttagatggtgtcctttctacattcgtgtcagctgcccgacaaggtgttgttgataccgatgttgacacaaaggatgttattgaatgtctcaaactttcacatcactctgacttagaagtgacaggtgacagttgtaacaatttcatgctcacctataataaggttgaaaacatgacgcccagagatcttggcgcatgtattgactgtaatgcaaggcatatcaatgcccaagtagcaaaaagtcacaatgtttcactcatctggaatgtaaaagactacatgtctttatctgaacagctgcgtaaacaaattcgtagtgctgccaagaagaacaacataccttttagactaacttgtgctacaactagacaggttgtcaatgtcataactactaaaatctcactcaagggtggtaagattgttagtacttgttttaaacttatgcttaaggccacattattgtgcgttcttgctgcattggtttgttatatcgttatgccagtacatacattgtcaatccatgatggttacacaaatgaaatcattggttacaaagccattcaggatggtgtcactcgtgacatcatttctactgatgattgttttgcaaataaacatgctggttttgacgcatggtttagccagcgtggtggttcatacaaaaatgacaaaagctgccctgtagtagctgctatcattacaagagagattggtttcatagtgcctggcttaccgggtactgtgctgagagcaatcaatggtgacttcttgcattttctacctcgtgtttttagtgctgttggcaacatttgctacacaccttccaaactcattgagtatagtgattttgctacctctgcttgcgttcttgctgctgagtgtacaatttttaaggatgctatgggcaaacctgtgccatattgttatgacactaatttgctagagggttctatttcttatagtgagcttcgtccagacactcgttatgtgcttatggatggttccatcatacagtttcctaacacttacctggagggttctgttagagtagtaacaacttttgatgctgagtactgtagacatggtacatgcgaaaggtcagaagtaggtatttgcctatctaccagtggtagatgggttcttaataatgagcattacagagctctatcaggagttttctgtggtgttgatgcgatgaatctcatagctaacatctttactcctcttgtgcaacctgtgggtgctttagatgtgtctgcttcagtagtggctggtggtattattgccatattggtgacttgtgctgcctactactttatgaaattcagacgtgtttttggtgagtacaaccatgttgttgctgctaatgcacttttgtttttgatgtctttcactatactctgtctggtaccagcttacagctttctgccgggagtctactcagtcttttacttgtacttgacattctatttcaccaatgatgtttcattcttggctcaccttcaatggtttgccatgttttctcctattgtgcctttttggataacagcaatctatgtattctgtatttctctgaagcactgccattggttctttaacaactatcttaggaaaagagtcatgtttaatggagttacatttagtaccttcgaggaggctgctttgtgtacctttttgctcaacaaggaaatgtacctaaaattgcgtagcgagacactgttgccacttacacagtataacaggtatcttgctctatataacaagtacaagtatttcagtggagccttagatactaccagctatcgtgaagcagcttgctgccacttagcaaaggctctaaatgactttagcaactcaggtgctgatgttctctaccaaccaccacagacatcaatcacttctgctgttctgcagagtggttttaggaaaatggcattcccgtcaggcaaagttgaagggtgcatggtacaagtaacctgtggaactacaactcttaatggattgtggttggatgacacagtatactgtccaagacatgtcatttgcacagcagaagacatgcttaatcctaactatgaagatctgctcattcgcaaatccaaccatagctttcttgttcaggctggcaatgttcaacttcgtgttattggccattctatgcaaaattgtctgcttaggcttaaagttgatacttctaaccctaagacacccaagtataaatttgtccgtatccaacctggtcaaacattttcagttctagcatgctacaatggttcaccatctggtgtttatcagtgtgccatgagacctaatcataccattaaaggttctttccttaatggatcatgtggtagtgttggttttaacattgattatgattgcgtgtctttctgctatatgcatcatatggagcttccaacaggagtacacgctggtactgacttagaaggtaaattctatggtccatttgttgacagacaaactgcacaggctgcaggtacagacacaaccataacattaaatgttttggcatggctgtatgctgctgttatcaatggtgataggtggtttcttaatagattcaccactactttgaatgactttaaccttgtggcaatgaagtacaactatgaacctttgacacaagatcatgttgacatattgggacctctttctgctcaaacaggaattgccgtcttagatatgtgtgctgctttgaaagagctgctgcagaatggtatgaatggtcgtactatccttggtagcactattttagaagatgagtttacaccatttgatgttgttagacaatgctctggtgttaccttccaaggtaagttcaagaaaattgttaagggcactcatcattggatgcttttaactttcttgacatcactattgattcttgttcaaagtacacagtggtcactgtttttctttgtttacgagaatgctttcttgccatttactcttggtattatggcaattgctgcatgtgctatgctgcttgttaagcataagcacgcattcttgtgcttgtttctgttaccttctcttgcaacagttgcttactttaatatggtctacatgcctgctagctgggtgatgcgtatcatgacatggcttgaattggctgacactagcttgtctggttataggcttaaggattgtgttatgtatgcttcagctttagttttgcttattctcatgacagctcgcactgtttatgatgatgctgctagacgtgtttggacactgatgaatgtcattacacttgtttacaaagtctactatggtaatgctttagatcaagctatttccatgtgggccttagttatttctgtaacctctaactattctggtgtcgttacgactatcatgtttttagctagagctatagtgtttgtgtgtgttgagtattacccattgttatttattactggcaacaccttacagtgtatcatgcttgtttattgtttcttaggctattgttgctgctgctactttggccttttctgtttactcaaccgttacttcaggcttactcttggtgtttatgactacttggtctctacacaagaatttaggtatatgaactcccaggggcttttgcctcctaagagtagtattgatgctttcaagcttaacattaagttgttgggtattggaggtaaaccatgtatcaaggttgctactgtacagtctaaaatgtctgacgtaaagtgcacatctgtggtactgctctcggttcttcaacaacttagagtagagtcatcttctaaattgtgggcacaatgtgtacaactccacaatgatattcttcttgcaaaagacacaactgaagctttcgagaagatggtttctcttttgtctgttttgctatccatgcagggtgctgtagacattaataggttgtgcgaggaaatgctcgataaccgtgctactcttcaggctattgcttcagaatttagttctttaccatcatatgccgcttatgccactgcccaggaggcctatgagcaggctgtagctaatggtgattctgaagtcgttctcaaaaagttaaagaaatctttgaatgtggctaaatctgagtttgaccgtgatgctgccatgcaacgcaagttggaaaagatggcagatcaggctatgacccaaatgtacaaacaggcaagatctgaggacaagagggcaaaagtaactagtgctatgcaaacaatgctcttcactatgcttaggaagcttgataatgatgcacttaacaacattatcaacaatgcgcgtgatggttgtgttccactcaacatcataccattgactacagcagccaaactcatggttgttgtccctgattatggtacctacaagaacacttgtgatggtaacacctttacatatgcatctgcactctgggaaatccagcaagttgttgatgcggatagcaagattgttcaacttagtgaaattaacatggacaattcaccaaatttggcttggcctcttattgttacagctctaagagccaactcagctgttaaactacagaataatgaactgagtccagtagcactacgacagatgtcctgtgcggctggtaccacacaaacagcttgtactgatgacaatgcacttgcctactataacaattcgaagggaggtaggtttgtgctggcattactatcagaccaccaagatctcaaatgggctagattccctaagagtgatggtacaggtacaatttacacagaactggaaccaccttgtaggtttgttacagacacaccaaaagggcctaaagtgaaatacttgtacttcatcaaaggcttaaacaacctaaatagaggtatggtgctgggcagtttagctgctacagtacgtcttcaggctggaaatgctacagaagtacctgccaattcaactgtgctttccttctgtgcttttgcagtagaccctgctaaagcatataaggattacctagcaagtggaggacaaccaatcaccaactgtgtgaagatgttgtgtacacacactggtacaggacaggcaattactgtaacaccagaagctaacatggaccaagagtcctttggtggtgcttcatgttgtctgtattgtagatgccacattgaccatccaaatcctaaaggattctgtgacttgaaaggtaagtacgtccaaatacctaccacttgtgctaatgacccagtgggttttacacttagaaacacagtctgtaccgtctgcggaatgtggaaaggttatggctgtagttgtgaccaactccgcgaacccttgatgcagtctgcggatgcatcaacgtttttaaacgggtttgcggtgtaagtgcagcccgtcttacaccgtgcggcacaggcactagtactgatgtcgtctacagggcttttgatatttacaacgaaaaagttgctggttttgcaaagttcctaaaaactaattgctgtcgcttccaggagaaggatgaggaaggcaatttattagactcttactttgtagttaagaggcatactatgtctaactaccaacatgaagagactatttataacttggttaaagattgtccagcggttgctgtccatgactttttcaagtttagagtagatggtgacatggtaccacatatatcacgtcagcgtctaactaaatacacaatggctgatttagtctatgctctacgtcattttgatgagggtaattgtgatacattaaaagaaatactcgtcacatacaattgctgtgatgatgattatttcaataagaaggattggtatgacttcgtagagaatcctgacatcttacgcgtatatgctaacttaggtgagcgtgtacgccaatcattattaaagactgtacaattctgcgatgctatgcgtgatgcaggcattgtaggcgtactgacattagataatcaggatcttaatgggaactggtacgatttcggtgatttcgtacaagtagcaccaggctgcggagttcctattgtggattcatattactcattgctgatgcccatcctcactttgactagggcattggctgctgagtcccatatggatgctgatctcgcaaaaccacttattaagtgggatttgctgaaatatgattttacggaagagagactttgtctcttcgaccgttattttaaatattgggaccagacataccatcccaattgtattaactgtttggatgataggtgtatccttcattgtgcaaactttaatgtgttattttctactgtgtttccacctacaagttttggaccactagtaagaaaaatatttgtagatggtgttccttttgttgtttcaactggataccattttcgtgagttaggagtcgtacataatcaggatgtaaacttacatagctcgcgtctcagtttcaaggaacttttagtgtatgctgctgatccagctatgcatgcagcttctggcaatttattgctagataaacgcactacatgcttttcagtagctgcactaacaaacaatgttgcttttcaaactgtcaaacccggtaattttaataaagacttttatgactttgctgtgtctaaaggtttctttaaggaaggaagttctgttgaactaaaacacttcttctttgctcaggatggcaacgctgctatcagtgattatgactattatcgttataatctgccaacaatgtgtgatatcagacaactcctattcgtagttgaagttgttgataaatactttgattgttacgatggtggctgtattaatgccaaccaagtaatcgttaacaatctggataaatcagctggtttcccatttaataaatggggtaaggctagactttattatgactcaatgagttatgaggatcaagatgcacttttcgcgtatactaagcgtaatgtcatccctactataactcaaatgaatcttaagtatgccattagtgcaaagaatagagctcgcaccgtagctggtgtctctatctgtagtactatgacaaatagacagtttcatcagaaattattgaagtcaatagccgccactagaggagctactgtggtaattggaacaagcaagttttacggtggctggcataatatgttaaaaactgtttacagtgatgtagaaactccacaccttatgggttgggattatccaaaatgtgacagagccatgcctaacatgcttaggataatggcctctcttgttcttgctcgcaaacataacacttgctgtaacttatcacaccgtttctacaggttagctaacgagtgtgcgcaagtattaagtgagatggtcatgtgtggcggctcactatatgttaaaccaggtggaacatcatccggtgatgctacaactgcttatgctaatagtgtctttaacatttgtcaagctgttacagccaatgtaaatgcacttctttcaactgatggtaataagatagctgacaagtatgtccgcaatctacaacacaggctctatgagtgtctctatagaaatagggatgttgatcatgaattcgtggatgagttttacgcttacctgcgtaaacatttctccatgatgattctttctgatgatgccgttgtgtgctataacagtaactatgcggctcaaggtttagtagctagcattaagaactttaaggcagttctttattatcaaaataatgtgttcatgtctgaggcaaaatgttggactgagactgaccttactaaaggacctcacgaattttgctcacagcatacaatgctagttaaacaaggagatgattacgtgtacctgccttacccagatccatcaagaatattaggcgcaggctgttttgtcgatgatattgtcaaaacagatggtacacttatgattgaaaggttcgtgtcactggctattgatgcttacccacttacaaaacatcctaatcaggagtatgctgatgtctttcacttgtatttacaatacattagaaagttacatgatgagcttactggccacatgttggacatgtattccgtaatgctaactaatgataacacctcacggtactgggaacctgagttttatgaggctatgtacacaccacatacagtcttgcaggctgtaggtgcttgtgtattgtgcaattcacagacttcacttcgttgcggtgcctgtattaggagaccattcctatgttgcaagtgctgctatgaccatgtcatttcaacatcacacaaattagtgttgtctgttaatccctatgtttgcaatgccccaggttgtgatgtcactgatgtgacacaactgtatctaggaggtatgagctattattgcaagtcacataagcctcccattagttttccattatgtgctaatggtcaggtttttggtttatacaaaaacacatgtgtaggcagtgacaatgtcactgacttcaatgcgatagcaacatgtgattggactaatgctggcgattacatacttgccaacacttgtactgagagactcaagcttttcgcagcagaaacgctcaaagccactgaggaaacatttaagctgtcatatggtattgccactgtacgcgaagtactctctgacagagaattgcatctttcatgggaggttggaaaacctagaccaccattgaacagaaactatgtctttactggttaccgtgtaactaaaaatagtaaagtacagattggagagtacacctttgaaaaaggtgactatggtgatgctgttgtgtacagaggtactacgacatacaagttgaatgttggtgattactttgtgttgacatctcacactgtaatgccacttagtgcacctactctagtgccacaagagcactatgtgagaattactggcttgtacccaacactcaacatctcagatgagttttctagcaatgttgcaaattatcaaaaggtcggcatgcaaaagtactctacactccaaggaccacctggtactggtaagagtcattttgccatcggacttgctctctattacccatctgctcgcatagtgtatacggcatgctctcatgcagctgttgatgccctatgtgaaaaggcattaaaatatttgcccatagataaatgtagtagaatcatacctgcgcgtgcgcgcgtagagtgttttgataaattcaaagtgaattcaacactagaacagtatgttttctgcactgtaaatgcattgccagaaacaactgctgacattgtagtctttgatgaaatctctatggctactaattatgacttgagtgttgtcaatgctagacttcgtgcaaaacactacgtctatattggcgatcctgctcaattaccagccccccgcacattgctgactaaaggcacactagaaccagaatattttaattcagtgtgcagacttatgaaaacaataggtccagacatgttccttggaacttgtcgccgttgtcctgctgaaattgttgacactgtgagtgctttagtttatgacaataagctaaaagcacacaaggataagtcagctcaatgcttcaaaatgttctacaaaggtgttattacacatgatgtttcatctgcaatcaacagacctcaaataggcgttgtaagagaatttcttacacgcaatcctgcttggagaaaagctgtttttatctcaccttataattcacagaacgctgtagcttcaaaaatcttaggattgcctacgcagactgttgattcatcacagggttctgaatatgactatgtcatattcacacaaactactgaaacagcacactcttgtaatgtcaaccgcttcaatgtggctatcacaagggcaaaaattggcattttgtgcataatgtctgatagagatctttatgacaaactgcaatttacaagtctagaaataccacgtcgcaatgtggctacattacaagcagaaaatgtaactggactttttaaggactgtagtaagatcattactggtcttcatcctacacaggcacctacacacctcagcgttgatataaagttcaagactgaaggattatgtgttgacataccaggcataccaaaggacatgacctaccgtagactcatctctatgatgggtttcaaaatgaattaccaagtcaatggttaccctaatatgtttatcacccgcgaagaagctattcgtcacgttcgtgcgtggattggctttgatgtagagggctgtcatgcaactagagatgctgtgggtactaacctacctctccagctaggattttctacaggtgttaacttagtagctgtaccgactggttatgttgacactgaaaataacacagaattcaccagagttaatgcaaaacctccaccaggtgaccagtttaaacatcttataccactcatgtataaaggcttgccctggaatgtagtgcgtattaagatagtacaaatgctcagtgatacactgaaaggattgtcagacagagtcgtgttcgtcctttgggcgcatggctttgagcttacatcaatgaagtactttgtcaagattggacctgaaagaacgtgttgtctgtgtgacaaacgtgcaacttgcttttctacttcatcagatacttatgcctgctggaatcattctgtgggttttgactatgtctataacccatttatgattgatgttcagcagtggggctttacgggtaaccttcagagtaaccatgaccaacattgccaggtacatggaaatgcacatgtggctagttgtgatgctatcatgactagatgtttagcagtccatgagtgctttgttaagcgcgttgattggtctgttgaataccctattataggagatgaactgagggttaattctgcttgcagaaaagtacaacacatggttgtgaagtctgcattgcttgctgataagtttccagttcttcatgacataggaaatccaaaggctatcaagtgtgtgcctcaggctgaagtagaatggaagttctacgatgctcagccatgtagtgacaaagcttacaaaatagaggaactcttctattcttatgctatacatcacgataaattcactgatggtgtttgtttgttttggaattgtaacgttgatcgttacccagccaatgcaattgtgtgtaggtttgacacaagagtcttgtcaaacttgaacttaccaggctgtgatggtggtagtttgtatgtgaataagcatgcattccacactccagctttcgataaaagtgcatttactaatttaaagcaattgcctttcttttactattctgatagtccttgtgagtctcatggcaaacaagtagtgtcggatattgattatgttccactcaaatctgctacgtgtattacacgatgcaatttaggtggtgctgtttgcagacaccatgcaaatgagtaccgacagtacttggatgcatataatatgatgatttctgctggatttagcctatggatttacaaacaatttgatacttataacctgtggaatacatttaccaggttacagagtttagaaaatgtggcttataatgttgttaataaaggacactttgatggacacgccggcgaagcacctgtttccatcattaataatgctgtttacacaaaggtagatggtattgatgtggagatctttgaaaataagacaacacttcctgttaatgttgcatttgagctttgggctaagcgtaacattaaaccagtgccagagattaagatactcaataatttgggtgttgatatcgctgctaatactgtaatctgggactacaaaagagaagccccagcacatgtatctacaataggtgtctgcacaatgactgacattgccaagaaacctactgagagtgcttgttcttcacttactgtcttgtttgatggtagagtggaaggacaggtagacctttttagaaacgcccgtaatggtgttttaataacagaaggttcagtcaaaggtctaacaccttcaaagggaccagcacaagctagcgtcaatggagtcacattaattggagaatcagtaaaaacacagtttaactactttaagaaagtagacggcattattcaacagttgcctgaaacctactttactcagagcagagacttagaggattttaagcccagatcacaaatggaaactgactttctcgagctcgctatggatgaattcatacagcgatataagctcgagggctatgccttcgaacacatcgtttatggagatttcagtcatggacaacttggcggtcttcatttaatgataggcttagccaagcgctcacaagattcaccacttaaattagaggattttatccctatggacagcacagtgaaaaattacttcataacagatgcgcaaacaggttcatcaaaatgtgtgtgttctgtgattgatcttttacttgatgactttgtcgagataataaagtcacaagatttgtcagtgatttcaaaagtggtcaaggttacaattgactatgctgaaatttcattcatgctttggtgtaaggatggacatgttgaaaccttctacccaaaactacaagcaagtcaagcgtggcaaccaggtgttgcgatgcctaacttgtacaagatgcaaagaatgcttcttgaaaagtgtgaccttcagaattatggtgaaaatgctgttataccaaaaggaataatgatgaatgtcgcaaagtatactcaactgtgtcaatacttaaatacacttactttagctgtaccctacaacatgagagttattcactttggtgctggctctgataaaggagttgcaccaggtacagctgtgctcagacaatggttgccaactggcacactacttgtcgattcagatcttaatgacttcgtctccgacgcagattctactttaattggagactgtgcaacagtacatacggctaataaatgggaccttattattagcgatatgtatgaccctaggaccaaacatgtgacaaaagagaatgactctaaagaagggtttttcacttatctgtgtggatttataaagcaaaaactagccctgggtggttctatagctgtaaagataacagagcattcttggaatgctgacctttacaagcttatgggccatttctcatggtggacagcttttgttacaaatgtaaatgcatcatcatcggaagcatttttaattggggctaactatcttggcaagccgaaggaacaaattgatggctataccatgcatgctaactacattttctggaggaacacaaatcctatccagttgtcttcctattcactctttgacatgagcaaatttcctcttaaattaagaggaactgctgtaatgtctcttaaggagaatcaaatcaatgatatgatttattctcttctggaaaaaggtaggcttatcattagagaaaacaacagagttgtggtttcaagtgatattcttgttaacaactaaacgaacatgtttattttcttattatttcttactctcactagtggtagtgaccttgaccggtgcaccacttttgatgatgttcaagctcctaattacactcaacatacttcatctatgaggggggtttactatcctgatgaaatttttagatcagacactctttatttaactcaggatttatttcttccattttattctaatgttacagggtttcatactattaatcatacgtttggcaaccctgtcataccttttaaggatggtatttattttgctgccacagagaaatcaaatgttgtccgtggttgggtttttggttctaccatgaacaacaagtcacagtcggtgattattattaacaattctactaatgttgttatacgagcatgtaactttgaattgtgtgacaaccctttctttgctgtttctaaacccatgggtacacagacacatactatgatattcgataatgcatttaattgcactttcgagtacatatctgatgccttttcgcttgatgtttcagaaaagtcaggtaattttaaacacttacgagagtttgtgtttaaaaataaagatgggtttctctatgtttataagggctatcaacctatagatgtagttcgtgatctaccttctggttttaacactttgaaacctatttttaagttgcctcttggtattaacattacaaattttagagccattcttacagccttttcacctgctcaagacatttggggcacgtcagctgcagcctattttgttggctatttaaagccaactacatttatgctcaagtatgatgaaaatggtacaatcacagatgctgttgattgttctcaaaatccacttgctgaactcaaatgctctgttaagagctttgagattgacaaaggaatttaccagacctctaatttcagggttgttccctcaggagatgttgtgagattccctaatattacaaacttgtgtccttttggagaggtttttaatgctactaaattcccttctgtctatgcatgggagagaaaaaaaatttctaattgtgttgctgattactctgtgctctacaactcaacatttttttcaacctttaagtgctatggcgtttctgccactaagttgaatgatctttgcttctccaatgtctatgcagattcttttgtagtcaagggagatgatgtaagacaaatagcgccaggacaaactggtgttattgctgattataattataaattgccagatgatttcatgggttgtgtccttgcttggaatactaggaacattgatgctacttcaactggtaattataattataaatataggtatcttagacatggcaagcttaggccctttgagagagacatatctaatgtgcctttctcccctgatggcaaaccttgcaccccacctgctcttaattgttattggccattaaatgattatggtttttacaccactactggcattggctaccaaccttacagagttgtagtactttcttttgaacttttaaatgcaccggccacggtttgtggaccaaaattatccactgaccttattaagaaccagtgtgtcaattttaattttaatggactcactggtactggtgtgttaactccttcttcaaagagatttcaaccatttcaacaatttggccgtgatgtttctgatttcactgattccgttcgagatcctaaaacatctgaaatattagacatttcaccttgctcttttgggggtgtaagtgtaattacacctggaacaaatgcttcatctgaagttgctgttctatatcaagatgttaactgcactgatgtttctacagcaattcatgcagatcaactcacaccagcttggcgcatatattctactggaaacaatgtattccagactcaagcaggctgtcttataggagctgagcatgtcgacacttcttatgagtgcgacattcctattggagctggcatttgtgctagttaccatacagtttctttattacgtagtactagccaaaaatctattgtggcttatactatgtctttaggtgctgatagttcaattgcttactctaataacaccattgctatacctactaacttttcaattagcattactacagaagtaatgcctgtttctatggctaaaacctccgtagattgtaatatgtacatctgcggagattctactgaatgtgctaatttgcttctccaatatggtagcttttgcacacaactaaatcgtgcactctcaggtattgctgctgaacaggatcgcaacacacgtgaagtgttcgctcaagttaaacaaatgtacaaaaccccaactttgaaatattttggtggttttaatttttcacaaatattacctgaccctctaaagccaactaagaggtcttttattgaggacttgctctttaataaggtgacactcgctgatgctggcttcatgaagcaatatggcgaatgcctaggtgatattaatgctagagatctcatttgtgcgcagaagttcaatggacttacagtgttgccacctctgctcactgatgatatgattgctgcctacactgctgctctagttagtggtactgccactgctggatggacatttggtgctggcgctgctcttcaaataccttttgctatgcaaatggcatataggttcaatggcattggagttacccaaaatgttctctatgagaaccaaaaacaaatcgccaaccaatttaacaaggcgattagtcaaattcaagaatcacttacaacaacatcaactgcattgggcaagctgcaagacgttgttaaccagaatgctcaagcattaaacacacttgttaaacaacttagctctaattttggtgcaatttcaagtgtgctaaatgatatcctttcgcgacttgataaagtcgaggcggaggtacaaattgacaggttaattacaggcagacttcaaagccttcaaacctatgtaacacaacaactaatcagggctgctgaaatcagggcttctgctaatcttgctgctactaaaatgtctgagtgtgttcttggacaatcaaaaagagttgacttttgtggaaagggctaccaccttatgtccttcccacaagcagccccgcatggtgttgtcttcctacatgtcacgtatgtgccatcccaggagaggaacttcaccacagcgccagcaatttgtcatgaaggcaaagcatacttccctcgtgaaggtgtttttgtgtttaatggcacttcttggtttattacacagaggaacttcttttctccacaaataattactacagacaatacatttgtctcaggaaattgtgatgtcgttattggcatcattaacaacacagtttatgatcctctgcaacctgagcttgactcattcaaagaagagctggacaagtacttcaaaaatcatacatcaccagatgttgatcttggcgacatttcaggcattaacgcttctgtcgtcaacattcaaaaagaaattgaccgcctcaatgaggtcgctaaaaatttaaatgaatcactcattgaccttcaagaattgggaaaatatgagcaatatattaaatggccttggtatgtttggctcggcttcattgctggactaattgccatcgtcatggttacaatcttgctttgttgcatgactagttgttgcagttgcctcaagggtgcatgctcttgtggttcttgctgcaagtttgatgaggatgactctgagccagttctcaagggtgtcaaattacattacacataaacgaacttatggatttgtttatgagattttttactcttggatcaattactgcacagccagtaaaaattgacaatgcttctcctgcaagtactgttcatgctacagcaacgataccgctacaagcctcactccctttcggatggcttgttattggcgttgcatttcttgctgtttttcagagcgctaccaaaataattgcgctcaataaaagatggcagctagccctttataagggcttccagttcatttgcaatttactgctgctatttgttaccatctattcacatcttttgcttgtcgctgcaggtatggaggcgcaatttttgtacctctatgccttgatatattttctacaatgcatcaacgcatgtagaattattatgagatgttggctttgttggaagtgcaaatccaagaacccattactttatgatgccaactactttgtttgctggcacacacataactatgactactgtataccatataacagtgtcacagatacaattgtcgttactgaaggtgacggcatttcaacaccaaaactcaaagaagactaccaaattggtggttattctgaggataggcactcaggtgttaaagactatgtcgttgtacatggctatttcaccgaagtttactaccagcttgagtctacacaaattactacagacactggtattgaaaatgctacattcttcatctttaacaagcttgttaaagacccaccgaatgtgcaaatacacacaatcgacggctcttcaggagttgctaatccagcaatggatccaatttatgatgagccgacgacgactactagcgtgcctttgtaagcacaagaaagtgagtacgaacttatgtactcattcgtttcggaagaaacaggtacgttaatagttaatagcgtacttctttttcttgctttcgtggtattcttgctagtcacactagccatccttactgcgcttcgattgtgtgcgtactgctgcaatattgttaacgtgagtttagtaaaaccaacggtttacgtctactcgcgtgttaaaaatctgaactcttctgaaggagttcctgatcttctggtctaaacgaactaactattattattattctgtttggaactttaacattgcttatcatggcagacaacggtactattaccgttgaggagcttaaacaactcctggaacaatggaacctagtaataggtttcctattcctagcctggattatgttactacaatttgcctattctaatcggaacaggtttttgtacataataaagcttgttttcctctggctcttgtggccagtaacacttgcttgttttgtgcttgctgctgtctacagaattaattgggtgactggcgggattgcgattgcaatggcttgtattgtaggcttgatgtggcttagctacttcgttgcttccttcaggctgtttgctcgtacccgctcaatgtggtcattcaacccagaaacaaacattcttctcaatgtgcctctccgggggacaattgtgaccagaccgctcatggaaagtgaacttgtcattggtgctgtgatcattcgtggtcacttgcgaatggccggacactccctagggcgctgtgacattaaggacctgccaaaagagatcactgtggctacatcacgaacgctttcttattacaaattaggagcgtcgcagcgtgtaggcactgattcaggttttgctgcatacaaccgctaccgtattggaaactataaattaaatacagaccacgccggtagcaacgacaatattgctttgctagtacagtaagtgacaacagatgtttcatcttgttgacttccaggttacaatagcagagatattgattatcattatgaggactttcaggattgctatttggaatcttgacgttataataagttcaatagtgagacaattatttaagcctctaactaagaagaattattcggagttagatgatgaagaacctatggagttagattatccataaaacgaacatgaaaattattctcttcctgacattgattgtatttacatcttgcgagctatatcactatcaggagtgtgttagaggtacgactgtactactaaaagaaccttgcccatcaggaacatacgagggcaattcaccatttcaccctcttgctgacaataaatttgcactaacttgcactagcacacactttgcttttgcttgtgctgacggtactcgacatacctatcagctgcgtgcaagatcagtttcaccaaaacttttcatcagacaagaggaggttcaacaagagctctactcgccactttttctcattgttgctgctctagtatttttaatactttgcttcaccattaagagaaagacagaatgaatgagctcactttaattgacttctatttgtgctttttagcctttctgctattccttgttttaataatgcttattatattttggttttcactcgaaatccaggatctagaagaaccttgtaccaaagtctaaacgaacatgaaacttctcattgttttgacttgtatttctctatgcagttgcatatgcactgtagtacagcgctgtgcatctaataaacctcatgtgcttgaagatccttgtaaggtacaacactaggggtaatacttatagcactgcttggctttgtgctctaggaaaggttttaccttttcatagatggcacactatggttcaaacatgcacacctaatgttactatcaactgtcaagatccagctggtggtgcgcttatagctaggtgttggtaccttcatgaaggtcaccaaactgctgcatttagagacgtacttgttgttttaaataaacgaacaaattaaaatgtctgataatggaccccaatcaaaccaacgtagtgccccccgcattacatttggtggacccacagattcaactgacaataaccagaatggaggacgcaatggggcaaggccaaaacagcgccgaccccaaggtttacccaataatactgcgtcttggttcacagctctcactcagcatggcaaggaggaacttagattccctcgaggccagggcgttccaatcaacaccaatagtggtccagatgaccaaattggctactaccgaagagctacccgacgagttcgtggtggtgacggcaaaatgaaagagctcagccccagatggtacttctattacctaggaactggcccagaagcttcacttccctacggcgctaacaaagaaggcatcgtatgggttgcaactgagggagccttgaatacacccaaagaccacattggcacccgcaatcctaataacaatgctgccaccgtgctacaacttcctcaaggaacaacattgccaaaaggcttctacgcagagggaagcagaggcggcagtcaagcctcttctcgctcctcatcacgtagtcgcggtaattcaagaaattcaactcctggcagcagtaggggaaattctcctgctcgaatggctagcggaggtggtgaaactgccctcgcgctattgctgctagacagattgaaccagcttgagagcaaagtttctggtaaaggccaacaacaacaaggccaaactgtcactaagaaatctgctgctgaggcatctaaaaagcctcgccaaaaacgtactgccacaaaacagtacaacgtcactcaagcatttgggagacgtggtccagaacaaacccaaggaaatttcggggaccaagacctaatcagacaaggaactgattacaaacattggccgcaaattgcacaatttgctccaagtgcctctgcattctttggaatgtcacgcattggcatggaagtcacaccttcgggaacatggctgacttatcatggagccattaaattggatgacaaagatccacaattcaaagacaacgtcatactgctgaacaagcacattgacgcatacaaaacattcccaccaacagagcctaaaaaggacaaaaagaaaaagactgatgaagctcagcctttgccgcagagacaaaagaagcagcccactgtgactcttcttcctgcggctgacatggatgatttctccagacaacttcaaaattccatgagtggagcttctgctgattcaactcaggcataaacactcatgatgaccacacaaggcagatgggctatgtaaacgttttcgcaattccgtttacgatacatagtctactcttgtgcagaatgaattctcgtaactaaacagcacaagtaggtttagttaactttaatctcacatagcaatctttaatcaatgtgtaacattagggaggacttgaaagagccaccacattttcatcgaggccacgcggagtacgatcgagggtacagtgaataatgctagggagagctgcctatatggaagagccctaatgtgtaaaattaattttagtagtgctatccccatgtgattttaatagcttcttaggagaatgac

SEQ ID NO: 70 - DNA, 29573 bp, Coronavirus
aactttaaaatctgtgtagctgtcgctcggctgcatgcctagtgcacctacgcagtataaacaataataaattttactgtcgttgacaagaaacgagtaactcgtccctcttctgcagactgcttacggtttcgtccgtgttgcagtcgatcatcagcatacctaggtttcgtccgggtgtgaccgaaaggtaagatggagagccttgttcttggtgtcaacgagaaaacacacgtccaactcagtttgcctgtccttcaggttagagacgtgctagtgcgtggcttcggggactctgtggaagaggccctatcggaggcacgtgaacacctcaaaaatggcacttgtggtctagtagagctggaaaaaggcgtactgccccagcttgaacagccctatgtgttcattaaacgttctgatgccttaagcaccaatcacggccacaaggtcgttgagctggttgcagaaatggacggcattcagtacggtcgtagcggtataacactgggagtactcgtgccacatgtgggcgaaaccccaattgcataccgcaatgttcttcttcgtaagaacggtaataagggagccggtggtcatagctatggcatcgatctaaagtcttatgacttaggtgacgagcttggcactgatcccattgaagattatgaacaaaactggaacactaagcatggcagtggtgcactccgtgaactcactcgtgagctcaatggaggtgcagtcactcgctatgtcgacaacaatttctgtggcccagatgggtaccctcttgattgcatcaaagattttctcgcacgcgcgggcaagtcaatgtgcactctttccgaacaacttgattacatcgagtcgaagagaggtgtctactgctgccgtgaccatgagcatgaaattgcctggttcactgagcgctctgataagagctacgagcaccagacacccttcgaaattaagagtgccaagaaatttgacactttcaaaggggaatgcccaaagtttgtgtttcctcttaactcaaaagtcaaagtcattcaaccacgtgttgaaaagaaaaagactgagggtttcatggggcgtatacgctctgtgtaccctgttgcatctccacaggagtgtaacaatatgcacttgtctaccttgatgaaatgtaatcattgcgatgaagtttcatggcagacgtgcgactttctgaaagccacttgtgaacattgtggcactgaaaatttagttattgaaggacctactacatgtgggtacctacctactaatgctgtagtgaaaatgccatgtcctgcctgtcaagacccagagattggacctgagcatagtgttgcagattatcacaaccactcaaacattgaaactcgactccgcaagggaggtaggactagatgttttggaggctgtgtgtttgcctatgttggctgctataataagcgtgcctactgggttcctcgtgctagtgctgatattggctcaggccatactggcattactggtgacaatgtggagaccttgaatgaggatctccttgagatactgagtcgtgaacgtgttaacattaacattgttggcgattttcatttgaatgaagaggttgccatcattttggcatctttctctgcttctacaagtgcctttattgacactataaagagtcttgattacaagtctttcaaaaccattgttgagtcctgcggtaactataaagttaccaagggaaagcccgtaaaaggtgcttggaacattggacaacagagatcagttttaacaccactgtgtggttttccctcacaggctgctggtgttatcagatcaatttttgcgcgcacacttgatgcagcaaaccactcaattcctgatttgcaaagagcagctgtcaccatacttgatggtatttctgaacagtcattacgtcttgtcgacgccatggtttatacttcagacctgctcaccaacagtgtcattattatggcatatgtaactggtggtcttgtacaacagacttctcagtggttgtctaatcttttgggcactactgttgaaaaactcaggcctatctttgaatggattgaggcgaaacttagtgcaggagttgaatttctcaaggatgcttgggagattctcaaatttctcattacaggtgtttttgacatcgtcaagggtcaaatacaggttgcttcagataacatcaaggattgtgtaaaatgcttcattgatgttgttaacaaggcactcgaaatgtgcattgatcaagtcactatcgctggcgcaaagttgcgatcactcaacttaggtgaagtcttcatcgctcaaagcaagggactttaccgtcagtgtatacgtggcaaggagcagctgcaactactcatgcctcttaaggcaccaaaagaagtaacctttcttgaaggtgattcacatgacacagtacttacctctgaggaggttgttctcaagaacggtgaactcgaagcactcgagacgcccgttgatagcttcacaaatggagctatcgttggcacaccagtctgtgtaaatggcctcatgctcttagagattaaggacaaagaacaatactgcgcattgtctcctggtttactggctacaaacaatgtctttcgcttaaaagggggtgcaccaattaaaggtgtaacctttggagaagatactgtttgggaagttcaaggttacaagaatgtgagaatcacatttgagcttgatgaacgtgttgacaaagtgcttaatgaaaagtgctctgtctacactgttgaatccggtaccgaagttactgagtttgcatgtgttgtagcagaggctgttgtgaagactttacaaccagtttctgatctccttaccaacatgggtattgatcttgatgagtggagtgtagctacattctacttatttgatgatgctggtgaagaaaacttttcatcacgtatgtattgttccttttaccctccagatgaggaagaagaggacgatgcagagtgtgaggaagaagaaattgatgaaacctgtgaacatgagtacggtacagaggatgattatcaaggtctccctctggaatttggtgcctcagctgaaacagttcgagttgaggaagaagaagaggaagactggctggatgatactactgagcaatcagagattgagccagaaccagaacctacacctgaagaaccagttaatcagtttactggttatttaaaacttactgacaatgttgccattaaatgtgttgacatcgttaaggaggcacaaagtgctaatcctatggtgattgtaaatgctgctaacatacacctgaaacatggtggtggtgtagcaggtgcactcaacaaggcaaccaatggtgccatgcaaaaggagagtgatgattacattaagctaaatggccctcttacagtaggagggtcttgtttgctttctggacataatcttgctaagaagtgtctgcatgttgttggacctaacctaaatgcaggtgaggacatccagcttcttaaggcagcatatgaaaatttcaattcacaggacatcttacttgcaccattgttgtcagcaggcatatttggtgctaaaccacttcagtctttacaagtgtgcgtgcagacggttcgtacacaggtttatattgcagtcaatgacaaagctctttatgagcaggttgtcatggattatcttgataacctgaagcctagagtggaagcacctaaacaagaggagccaccaaacacagaagattccaaaactgaggagaaatccgtcgtacagaagcctgtcgatgtgaagccaaaaattaaggcctgcattgatgaggttaccacaacactggaagaaactaagtttcttaccaataagttactcttgtttgctgatatcaatggtaagctttaccatgattctcagaacatgcttagaggtgaagatatgtctttccttgagaaggatgcaccttacatggtaggtgatgttatcactagtggtgatatcacttgtgttgtaataccctccaaaaaggctggtggcactactgagatgctctcaagagctttgaagaaagtgccagttgatgagtatataaccacgtaccctggacaaggatgtgctggttatacacttgaggaagctaagactgctcttaagaaatgcaaatctgcattttatgtactaccttcagaagcacctaatgctaaggaagagattctaggaactgtatcctggaatttgagagaaatgcttgctcatgctgaagagacaagaaaattaatgcctatatgcatggatgttagagccataatggcaaccatccaacgtaagtataaaggaattaaaattcaagagggcatcgttgactatggtgtccgattcttcttttatactagtaaagagcctgtagcttctattattacgaagctgaactctctaaatgagccgcttgtcacaatgccaattggttatgtgacacatggttttaatcttgaagaggctgcgcgctgtatgcgttctcttaaagctcctgccgtagtgtcagtatcatcaccagatgctgttactacatataatggatacctcacttcgtcatcaaagacatctgaggagcactttgtagaaacagtttctttggctggctcttacagagattggtcctattcaggacagcgtacagagttaggtgttgaatttcttaagcgtggtgacaaaattgtgtaccacactctggagagccccgtcgagtttcatcttgacggtgaggttctttcacttgacaaactaaagagtctcttatccctgcgggaggttaagactataaaagtgttcacaactgtggacaacactaatctccacacacagcttgtggatatgtctatgacatatggacagcagtttggtccaacatacttggatggtgctgatgttacaaaaattaaacctcatgtaaatcatgagggtaagactttctttgtactacctagtgatgacacactacgtagtgaagctttcgagtactaccatactcttgatgagagttttcttggtaggtacatgtctgctttaaaccacacaaagaaatggaaatttcctcaagttggtggtttaacttcaattaaatgggctgataacaattgttatttgtctagtgttttattagcacttcaacagcttgaagtcaaattcaatgcaccagcacttcaagaggcttattatagagcccgtgctggtgatgctgctaacttttgtgcactcatactcgcttacagtaataaaactgttggcgagcttggtgatgtcagagaaactatgacccatcttctacagcatgctaatttggaatctgcaaagcgagttcttaatgtggtgtgtaaacattgtggtcagaaaactactaccttaacgggtgtagaagctgtgatgtatatgggtactctatcttatgataatcttaagacaggtgtttccattccatgtgtgtgtggtcgtgatgctacacaatatctagtacaacaagagtcttcttttgttatgatgtctgcaccacctgctgagtataaattacagcaaggtacattcttatgtgcgaatgagtacactggtaactatcagtgtggtcattacactcatataactgctaaggagaccctctatcgtattgacggagctcaccttacaaagatgtcagagtacaaaggaccagtgactgatgttttctacaaggaaacatcttacactacaaccatcaagcctgtgtcgtataaactcgatggagttacttacacagagattgaaccaaaattggatgggtattataaaaaggataatgcttactatacagagcagcctatagaccttgtaccaactcaaccattaccaaatgcgagttttgataatttcaaactcacatgttctaacacaaaatttgctgatgatttaaatcaaatgacaggcttcacaaagccagcttcacgagagctatctgtcacattcttcccagacttgaatggcgatgtagtggctattgactatagacactattcagcgagtttcaagaaaggtgctaaattactgcataagccaattgtttggcacattaaccaggctacaaccaagacaacgttcaaaccaaacacttggtgtttacgttgtctttggagtacaaagccagtagatacttcaaattcatttgaagttctggcagtagaagacacacaaggaatggacaatcttgcttgtgaaagtcaacaacccacctctgaagaagtagtggaaaatcctaccatacagaaggaagtcatagagtgtgacgtgaaaactaccgaagttgtaggcaatgtcatacttaaaccatcagatgaaggtgttaaagtaacacaagagttaggtcatgaggatcttatggctgcttatgtggaaaacacaagcattaccattaagaaacctaatgagctttcactagccttaggtttaaaaacaattgccactcatggtattgctgcaattaatagtgttccttggagtaaaattttggcttatgtcaaaccattcttaggacaagcagcaattacaacatcaaattgcgctaagagattagcacaacgtgtgtttaacaattatatgccttatgtgtttacattattgttccaattgtgtacttttactaaaagtaccaattctagaattagagcttcactacctacaactattgctaaaaatagtgttaagagtgttgctaaattatgtttggatgccggcattaattatgtgaagtcacccaaattttctaaattgttcacaatcgctatgtggctattgttgttaagtatttgcttaggttctctaatctgtgtaactgctgcttttggtgtactcttatctaattttggtgctccttcttattgtaatggcgttagagaattgtatcttaattcgtctaacgttactactatggatttctgtgaaggttcttttccttgcagcatttgtttaagtggattagactcccttgattcttatccagctcttgaaaccattcaggtgacgatttcatcgtacaagctagacttgacaattttaggtctggccgctgagtgggttttggcatatatgttgttcacaaaattcttttatttattaggtctttcagctataatgcaggtgttctttggctattttgctagtcatttcatcagcaattcttggctcatgtggtttatcattagtattgtacaaatggcacccgtttctgcaatggttaggatgtacatcttctttgcttctttctactacatatggaagagctatgttcatatcatggatggttgcacctcttcgacttgcatgatgtgctataagcgcaatcgtgccacacgcgttgagtgtacaactattgttaatggcatgaagagatctttctatgtctatgcaaatggaggccgtggcttctgcaagactcacaattggaattgtctcaattgtgacacattttgcactggtagtacattcattagtgatgaagttgctcgtgatttgtcactccagtttaaaagaccaatcaaccctactgaccagtcatcgtatattgttgatagtgttgctgtgaaaaatggcgcgcttcacctctactttgacaaggctggtcaaaagacctatgagagacatccgctctcccattttgtcaatttagacaatttgagagctaacaacactaaaggttcactgcctattaatgtcatagtttttgatggcaagtccaaatgcgacgagtctgcttctaagtctgcttctgtgtactacagtcagctgatgtgccaacctattctgttgcttgaccaagctcttgtatcagacgttggagatagtactgaagtttccgttaagatgtttgatgcttatgtcgacaccttttcagcaacttttagtgttcctatggaaaaacttaaggcacttgttgctacagctcacagcgagttagcaaagggtgtagctttagatggtgtcctttctacattcgtgtcagctgcccgacaaggtgttgttgataccgatgttgacacaaaggatgttattgaatgtctcaaactttcacatcactctgacttagaagtgacaggtgacagttgtaacaatttcatgctcacctataataaggttgaaaacatgacgcccagagatcttggcgcatgtattgactgtaatgcaaggcatatcaatgcccaagtagcaaaaagtcacaatgtttcactcatctggaatgtaaaagactacatgtctttatctgaacagctgcgtaaacaaattcgtagtgctgccaagaagaacaacataccttttagactaacttgtgctacaactagacaggttgtcaatgtcataactactaaaatctcactcaagggtggtaagattgttagtacttgttttaaacttatgcttaaggccacattattgtgcgttcttgctgcattggtttgttatatcgttatgccagtacatacattgtcaatccatgatggttacacaaatgaaatcattggttacaaagccattcaggatggtgtcactcgtgacatcatttctactgatgattgttttgcaaataaacatgctggttttgacgcatggtttagccagcgtggtggttcatacaaaaatgacaaaagctgccctgtagtagctgctatcattacaagagagattggtttcatagtgcctggcttaccgggtactgtgctgagagcaatcaatggtgacttcttgcattttctacctcgtgtttttagtgctgttggcaacatttgctacacaccttccaaactcattgagtatagtgattttgctacctctgcttgcgttcttgctgctgagtgtacaatttttaaggatgctatgggcaaacctgtgccatattgttatgacactaatttgctagagggttctatttcttatagtgagcttcgtccagacactcgttatgtgcttatggatggttccatcatacagtttcctaacacttacctggagggttctgttagagtagtaacaacttttgatgctgagtactgtagacatggtacatgcgaaaggtcagaagtaggtatttgcctatctaccagtggtagatgggttcttaataatgagcattacagagctctatcaggagttttctgtggtgttgatgcgatgaatctcatagctaacatctttactcctcttgtgcaacctgtgggtgctttagatgtgtctgcttcagtagtggctggtggtattattgccatattggtgacttgtgctgcctactactttatgaaattcagacgtgtttttggtgagtacaaccatgttgttgctgctaatgcacttttgtttttgatgtctttcactatactctgtctggtaccagcttacagctttctgccgggagtctactcagtcttttacttgtacttgacattctatttcaccaatgatgtttcattcttggctcaccttcaatggtttgccatgttttctcctattgtgcctttttggataacagcaatctatgtattctgtatttctctgaagcactgccattggttctttaacaactatcttaggaaaagagtcatgtttaatggagttacatttagtaccttcgaggaggctgctttgtgtacctttttgctcaacaaggaaatgtacctaaaattgcgtagcgagacactgttgccacttacacagtataacaggtatcttgctctatataacaagtacaagtatttcagtggagccttagatactaccagctatcgtgaagcagcttgctgccacttagcaaaggctctaaatgactttagcaactcaggtgctgatgttctctaccaaccaccacagacatcaatcacttctgctgttctgcagagtggttttaggaaaatggcattcccgtcaggcaaagttgaagggtgcatggtacaagtaacctgtggaactacaactcttaatggattgtggttggatgacacagtatactgtccaagacatgtcatttgcacagcagaagacatgcttaatcctaactatgaagatctgctcattcgcaaatccaaccatagctttcttgttcaggctggcaatgttcaacttcgtgttattggccattctatgcaaaattgtctgcttaggcttaaagttgatacttctaaccctaagacacccaagtataaatttgtccgtatccaacctggtcaaacattttcagttctagcatgctacaatggttcaccatctggtgtttatcagtgtgccatgagacctaatcataccattaaaggttctttccttaatggatcatgtggtagtgttggttttaacattgattatgattgcgtgtctttctgctatatgcatcatatggagcttccaacaggagtacacgctggtactgacttagaaggtaaattctatggtccatttgttgacagacaaactgcacaggctgcaggtacagacacaaccataacattaaatgttttggcatggctgtatgctgctgttatcaatggtgataggtggtttcttaatagattcaccactactttgaatgactttaaccttgtggcaatgaagtacaactatgaacctttgacacaagatcatgttgacatattgggacctctttctgctcaaacaggaattgccgtcttagatatgtgtgctgctttgaaagagctgctgcagaatggtatgaatggtcgtactatccttggtagcactattttagaagatgagtttacaccatttgatgttgttagacaatgctctggtgttaccttccaaggtaagttcaagaaaattgttaagggcactcatcattggatgcttttaactttcttgacatcactattgattcttgttcaaagtacacagtggtcactgtttttctttgtttacgagaatgctttcttgccatttactcttggtattatggcaattgctgcatgtgctatgctgcttgttaagcataagcacgcattcttgtgcttgtttctgttaccttctcttgcaacagttgcttactttaatatggtctacatgcctgctagctgggtgatgcgtatcatgacatggcttgaattggctgacactagcttgtctggttataggcttaaggattgtgttatgtatgcttcagctttagttttgcttattctcatgacagctcgcactgtttatgatgatgctgctagacgtgtttggacactgatgaatgtcattacacttgtttacaaagtctactatggtaatgctttagatcaagctatttccatgtgggccttagttatttctgtaacctctaactattctggtgtcgttacgactatcatgtttttagctagagctatagtgtttgtgtgtgttgagtattatccattgttatttattactggcaacaccttacagtgtatcatgcttgtttattgtttcttaggctattgttgctgctgctactttggccttttctgtttactcaaccgttacttcaggcttactcttggtgtttatgactacttggtctctacacaagaatttaggtatatgaactcccaggggcttttgcctcctaagagtagtattgatgctttcaagcttaacattaagttgttgggtattggaggtaaaccatgtatcaaggttgctactgtacagtctaaaatgtctgacgtaaagtgcacatctgtggtactgctctcggttcttcaacaacttagagtagagtcatcttctaaattgtgggcacaatgtgtacaactccacaatgatattcttcttgcaaaagacacaactgaagctttcgagaagatggtttctcttttgtctgttttgctatccatgcagggtgctgtagacattaataggttgtgcgaggaaatgctcgataaccgtgctactcttcaggctattgcttcagaatttagttctttaccatcatatgccgcttatgccactgcccaggaggcctatgagcaggctgtagctaatggtgattctgaagtcgttctcaaaaagttaaagaaatctttgaatgtggctaaatctgagtttgaccgtgatgctgccatgcaacgcaagttggaaaagatggcagatcaggctatgacccaaatgtacaaacaggcaagatctgaggacaagagggcaaaagtaactagtgctatgcaaacaatgctcttcactatgcttaggaagcttgataatgatgcacttaacaacattatcaacaatgcgcgtgatggttgtgttccactcaacatcataccattgactacagcagccaaactcatggttgttgtccctgattatggtacctacaagaacacttgtgatggtaacacctttacatatgcatctgcactctgggaaatccagcaagttgttgatgcggatagcaagattgttcaacttagtgaaattaacatggacaattcaccaaatttggcttggcctcttattgttacagctctaagagccaactcagctgttaaactacagaataatgaactgagtccagtagcactacgacagatgtcctgtgcggctggtaccacacaaacagcttgtactgatgacaatgcacttgcctactataacaattcgaagggaggtaggtttgtgctggcattactatcagaccaccaagatctcaaatgggctagattccctaagagtgatggtacaggtacaatttacacagaactggaaccaccttgtaggtttgttacagacacaccaaaagggcctaaagtgaaatacttgtacttcatcaaaggcttaaacaacctaaatagaggtatggtgctgggcagtttagctgctacagtacgtcttcaggctggaaatgctacagaagtacctgccaattcaactgtgctttccttctgtgcttttgcagtagaccctgctaaagcatataaggattacctagcaagtggaggacaaccaatcaccaactgtgtgaagatgttgtgtacacacactggtacaggacaggcaattactgtaacaccagaagctaacatggaccaagagtcctttggtggtgcttcatgttgtctgtattgtagatgccacattgaccatccaaatcctaaaggattctgtgacttgaaaggtaagtacgtccaaatacctaccacttgtgctaatgacccagtgggttttacacttagaaacacagtctgtaccgtctgcggaatgtggaaaggttatggctgtagttgtgaccaactccgcgaacccttgatgcagtctgcggatgcatcaacgtttttaaacgggtttgcggtgtaagtgcagcccgtcttacaccgtgcggcacaggcactagtactgatgtcgtctacagggcttttgatatttacaacgaaaaagttgctggttttgcaaagttcctaaaaactaattgctgtcgcttccaggagaaggatgaggaaggcaatttattagactcttactttgtagttaagaggcatactatgtctaactaccaacatgaagagactatttataacttggttaaagattgtccagcggttgctgtccatgactttttcaagtttagagtagatggtgacatggtaccacatatatcacgtcagcgtctaactaaatacacaatggctgatttagtctatgctctacgtcattttgatgagggtaattgtgatacattaaaagaaatactcgtcacatacaattgctgtgatgatgattatttcaataagaaggattggtatgacttcgtagagaatcctgacatcttacgcgtatatgctaacttaggtgagcgtgtacgccaatcattattaaagactgtacaattctgcgatgctatgcgtgatgcaggcattgtaggcgtactgacattagataatcaggatcttaatgggaactggtacgatttcggtgatttcgtacaagtagcaccaggctgcggagttcctattgtggattcatattactcattgctgatgcccatcctcactttgactagggcattggctgctgagtcccatatggatgctgatctcgcaaaaccacttattaagtgggatttgctgaaatatgattttacggaagagagactttgtctcttcgaccgttattttaaatattgggaccagacataccatcccaattgtattaactgtttggatgataggtgtatccttcattgtgcaaactttaatgtgttattttctactgtgtttccacctacaagttttggaccactagtaagaaaaatatttgtagatggtgttccttttgttgtttcaactggataccattttcgtgagttaggagtcgtacataatcaggatgtaaacttacatagctcgcgtctcagtttcaaggaacttttagtgtatgctgctgatccagctatgcatgcagcttctggcaatttattgctagataaacgcactacatgcttttcagtagctgcactaacaaacaatgttgcttttcaaactgtcaaacccggtaattttaataaagacttttatgactttgctgtgtctaaaggtttctttaaggaaggaagttctgttgaactaaaacacttcttctttgctcaggatggcaacgctgctatcagtgattatgactattatcgttataatctgccaacaatgtgtgatatcagacaactcctattcgtagttgaagttgttgataaatactttgattgttacgatggtggctgtattaatgccaaccaagtaatcgttaacaatctggataaatcagctggtttcccatttaataaatggggtaaggctagactttattatgactcaatgagttatgaggatcaagatgcacttttcgcgtatactaagcgtaatgtcatccctactataactcaaatgaatcttaagtatgccattagtgcaaagaatagagctcgcaccgtagctggtgtctctatctgtagtactatgacaaatagacagtttcatcagaaattattgaagtcaatagccgccactagaggagctactgtggtaattggaacaagcaagttttacggtggctggcataatatgttaaaaactgtttacagtgatgtagaaactccacaccttatgggttgggattatccaaaatgtgacagagccatgcctaacatgcttaggataatggcctctcttgttcttgctcgcaaacataacacttgctgtaacttatcacaccgtttctacaggttagctaacgagtgtgcgcaagtattaagtgagatggtcatgtgtggcggctcactatatgttaaaccaggtggaacatcatccggtgatgctacaactgcttatgctaatagtgtctttaacatttgtcaagctgttacagccaatgtaaatgcacttctttcaactgatggtaataagatagctgacaagtatgtccgcaatctacaacacaggctctatgagtgtctctatagaaatagggatgttgatcatgaattcgtggatgagttttacgcttacctgcgtaaacatttctccatgatgattctttctgatgatgccgttgtgtgctataacagtaactatgcggctcaaggtttagtagctagcattaagaactttaaggcagttctttattatcaaaataatgtgttcatgtctgaggcaaaatgttggactgagactgaccttactaaaggacctcacgaattttgctcacagcatacaatgctagttaaacaaggagatgattacgtgtacctgccttacccagatccatcaagaatattaggcgcaggctgttttgtcgatgatattgtcaaaacagatggtacacttatgattgaaaggttcgtgtcactggctattgatgcttacccacttacaaaacatcctaatcaggagtatgctgatgtctttcacttgtatttacaatacattagaaagttacatgatgagcttactggccacatgttggacatgtattccgtaatgctaactaatgataacacctcacggtactgggaacctgagttttatgaggctatgtacacaccacatacagtcttgcaggctgtaggtgcttgtgtattgtgcaattcacagacttcacttcgttgcggtgcctgtattaggagaccattcctatgttgcaagtgctgctatgaccatgtcatttcaacatcacacaaattagtgttgtctgttaatccctatgtttgcaatgccccaggttgtgatgtcactgatgtgacacaactgtatctaggaggtatgagctattattgcaagtcacataagcctcccattagttttccattatgtgctaatggtcaggtttttggtttatacaaaaacacatgtgtaggcagtgacaatgtcactgacttcaatgcgatagcaacatgtgattggactaatgctggcgattacatacttgccaacacttgtactgagagactcaagcttttcgcagcagaaacgctcaaagccactgaggaaacatttaagctgtcatatggtattgccactgtacgcgaagtactctctgacagagaattgcatctttcatgggaggttggaaaacctagaccaccattgaacagaaactatgtctttactggttaccgtgtaactaaaaatagtaaagtacagattggagagtacacctttgaaaaaggtgactatggtgatgctgttgtgtacagaggtactacgacatacaagttgaatgttggtgattactttgtgttgacatctcacactgtaatgccacttagtgcacctactctagtgccacaagagcactatgtgagaattactggcttgtacccaacactcaacatctcagatgagttttctagcaatgttgcaaattatcaaaaggtcggcatgcaaaagtactctacactccaaggaccacctggtactggtaagagtcattttgccatcggacttgctctctattacccatctgctcgcatagtgtatacggcatgctctcatgcagctgttgatgccctatgtgaaaaggcattaaaatatttgcccatagataaatgtagtagaatcatacctgcgcgtgcgcgcgtagagtgttttgataaattcaaagtgaattcaacactagaacagtatgttttctgcactgtaaatgcattgccagaaacaactgctgacattgtagtctttgatgaaatctctatggctactaattatgacttgagtgttgtcaatgctagacttcgtgcaaaacactacgtctatattggcgatcctgctcaattaccagccccccgcacattgctgactaaaggcacactagaaccagaatattttaattcagtgtgcagacttatgaaaacaataggtccagacatgttccttggaacttgtcgccgttgtcctgctgaaattgttgacactgtgagtgctttagtttatgacaataagctaaaagcacacaaggataagtcagctcaatgcttcaaaatgttctacaaaggtgttattacacatgatgtttcatctgcaatcaacagacctcaaataggcgttgtaagagaatttcttacacgcaatcctgcttggagaaaagctgtttttatctcaccttataattcacagaacgctgtagcttcaaaaatcttaggattgcctacgcagactgttgattcatcacagggttctgaatatgactatgtcatattcacacaaactactgaaacagcacactcttgtaatgtcaaccgcttcaatgtggctatcacaagggcaaaaattggcattttgtgcataatgtctgatagagatctttatgacaaactgcaatttacaagtctagaaataccacgtcgcaatgtggctacattacaagcagaaaatgtaactggactttttaaggactgtagtaagatcattactggtcttcatcctacacaggcacctacacacctcagcgttgatataaagttcaagactgaaggattatgtgttgacataccaggcataccaaaggacatgacctaccgtagactcatctctatgatgggtttcaaaatgaattaccaagtcaatggttaccctaatatgtttatcacccgcgaagaagctattcgtcacgttcgtgcgtggattggctttgatgtagagggctgtcatgcaactagagatgctgtgggtactaacctacctctccagctaggattttctacaggtgttaacttagtagctgtaccgactggttatgttgacactgaaaataacacagaattcaccagagttaatgcaaaacctccaccaggtgaccagtttaaacatcttataccactcatgtataaaggcttgccctggaatgtagtgcgtattaagatagtacaaatgctcagtgatacactgaaaggattgtcagacagagtcgtgttcgtcctttgggcgcatggctttgagcttacatcaatgaagtactttgtcaagattggacctgaaagaacgtgttgtctgtgtgacaaacgtgcaacttgcttttctacttcatcagatacttatgcctgctggaatcattctgtgggttttgactatgtctataacccatttatgattgatgttcagcagtggggctttacgggtaaccttcagagtaaccatgaccaacattgccaggtacatggaaatgcacatgtggctagttgtgatgctatcatgactagatgtttagcagtccatgagtgctttgttaagcgcgttgattggtctgttgaataccctattataggagatgaactgagggttaattctgcttgcagaaaagtacaacacatggttgtgaagtctgcattgcttgctgataagtttccagttcttcatgacattggaaatccaaaggctatcaagtgtgtgcctcaggctgaagtagaatggaagttctacgatgctcagccatgtagtgacaaagcttacaaaatagaggagctcttctattcttatgctacacatcacgataaattcactgatggtgtttgtttgttttggaattgtaacgttgatcgttacccagccaatgcaattgtgtgtaggtttgacacaagagtcttgtcaaacttgaacttaccaggctgtgatggtggtagtttgtatgtgaataagcatgcattccacactccagctttcgataaaagtgcatttactaatttaaagcaattgcctttcttttactattctgatagtccttgtgagtctcatggcaaacaagtagtgtcggatattgattatgttccactcaaatctgctacgtgtattacacgatgcaatttaggtggtgctgtttgcagacaccatgcaaatgagtaccgacagtacttggatgcatataatatgatgatttctgctggatttagcctatggatttacaaacaatttgatacttataacctgtggaatacatttaccaggttacagagtttagaaaatgtggcttataatgttgttaataaaggacactttgatggacacgccggcgaagcacctgtttccatcattaataatgctgtttacacaaaggtagatggtattgatgtggagatctttgaaaataagacaacacttcctgttaatgttgcatttgagctttgggctaagcgtaacattaaaccagtgccagagattaagatactcaataatttgggtgttgatatcgctgctaatactgtaatctgggactacaaaagagaagccccagcacatgtatctacaataggtgtctgcacaatgactgacattgccaagaaacctactgagagtgcttgttcttcacttactgtcttgtttgatggtagagtggaaggacaggtagacctttttagaaacgcccgtaatggtgttttaataacagaaggttcagtcaaaggtctaacaccttcaaagggaccagcacaagctagcgtcaatggagtcacattaattggagaatcagtaaaaacacagtttaactactttaagaaagtagacggcattattcaacagttgcctgaaacctactttactcagagcagagacttagaggattttaagcccagatcacaaatggaaactgactttctcgagctcgctatggatgaattcatacagcgatataagctcgagggctatgccttcgaacacatcgtttatggagatttcagtcatggacaacttggcggtcttcatttaatgataggcttagccaagcgctcacaagattcaccacttaaattagaggattttatccctatggacagcacagtgaaaaattacttcataacagatgcgcaaacaggttcatcaaaatgtgtgtgttctgtgattgatcttttacttgatgactttgtcgagataataaagtcacaagatttgtcagtgatttcaaaagtggtcaaggttacaattgactatgctgaaatttcattcatgctttggtgtaaggatggacatgttgaaaccttctacccaaaactacaagcaagtcaagcgtggcaaccaggtgttgcgatgcctaacttgtacaagatgcaaagaatgcttcttgaaaagtgtgaccttcagaattatggtgaaaatgctgttataccaaaaggaataatgatgaatgtcgcaaagtatactcaactgtgtcaatacttaaatacacttactttagctgtaccctacaacatgagagttattcactttggtgctggctctgataaaggagttgcaccaggtacagctgtgctcagacaatggttgccaactggcacactacttgtcgattcagatcttaatgacttcgtctccgacgcagattctactttaattggagactgtgcaacagtacatacggctaataaatgggaccttattattagcgatatgtatgaccctaggaccaaacatgtgacaaaagagaatgactctaaagaagggtttttcacttatctgtgtggatttataaagcaaaaactagccctgggtggttctatagctgtaaagataacagagcattcttggaatgctgacctttacaagcttatgggccatttctcatggtggacagcttttgttacaaatgtaaatgcatcatcatcggaagcatttttaattggggctaactatcttggcaagccgaaggaacaaattgatggctataccatgcatgctaactacattttctggaggaacacaaatcctatccagttgtcttcctattcactctttgacatgagcaaatttcctcttaaattaagaggaactgctgtaatgtctcttaaggagaatcaaatcaatgatatgatttattctcttctggaaaaaggtaggcttatcattagagaaaacaacagagttgtggtttcaagtgatattcttgttaacaactaaacgaacatgtttattttcttattatttcttactctcactagtggtagtgaccttgaccggtgcaccacttttgatgatgttcaagctcctaattacactcaacatacttcatctatgaggggggtttactatcctgatgaaatttttagatcagacactctttatttaactcaggatttatttcttccattttattctaatgttacagggtttcatactattaatcatacgtttggcaaccctgtcataccttttaaggatggtatttattttgctgccacagagaaatcaaatgttgtccgtggttgggtttttggttctaccatgaacaacaagtcacagtcggtgattattattaacaattctactaatgttgttatacgagcatgtaactttgaattgtgtgacaaccctttctttgctgtttctaaacccatgggtacacagacacatactatgatattcgataatgcatttaattgcactttcgagtacatatctgatgccttttcgcttgatgtttcagaaaagtcaggtaattttaaacacttacgagagtttgtgtttaaaaataaagatgggtttctctatgtttataagggctatcaacctatagatgtagttcgtgatctaccttctggttttaacactttgaaacctatttttaagttgcctcttggtattaacattacaaattttagagccattcttacagccttttcacctgctcaagacatttggggcacgtcagctgcagcctattttgttggctatttaaagccaactacatttatgctcaagtatgatgaaaatggtacaatcacagatgctgttgattgttctcaaaatccacttgctgaactcaaatgctctgttaagagctttgagattgacaaaggaatttaccagacctctaatttcagggttgttccctcaggagatgttgtgagattccctaatattacaaacttgtgtccttttggagaggtttttaatgctactaaattcccttctgtctatgcatgggagagaaaaaaaatttctaattgtgttgctgattactctgtgctctacaactcaacatttttttcaacctttaagtgctatggcgtttctgccactaagttgaatgatctttgcttctccaatgtctatgcagattcttttgtagtcaagggagatgatgtaagacaaatagcgccaggacaaactggtgttattgctgattataattataaattgccagatgatttcatgggttgtgtccttgcttggaatactaggaacattgatgctacttcaactggtaattataattataaatataggtatcttagacatggcaagcttaggccctttgagagagacatatctaatgtgcctttctcccctgatggcaaaccttgcaccccacctgctcttaattgttattggccattaaatgattatggtttttacaccactactggcattggctaccaaccttacagagttgtagtactttcttttgaacttttaaatgcaccggccacggtttgtggaccaaaattatccactgaccttattaagaaccagtgtgtcaattttaattttaatggactcactggtactggtgtgttaactccttcttcaaagagatttcaaccatttcaacaatttggccgtgatgtttctgatttcactgattccgttcgagatcctaaaacatctgaaatattagacatttcaccttgctcttttgggggtgtaagtgtaattacacctggaacaaatgcttcatctgaagttgctgttctatatcaagatgttaactgcactgatgtttctacagcaattcatgcagatcaactcacaccagcttggcgcatatattctactggaaacaatgtattccagactcaagcaggctgtcttataggagctgagcatgtcgacacttcttatgagtgcgacattcctattggagctggcatttgtgctagttaccatacagtttctttattacgtagtactagccaaaaatctattgtggcttatactatgtctttaggtgctgatagttcaattgcttactctaataacaccattgctatacctactaacttttcaattagcattactacagaagtaatgcctgtttctatggctaaaacctccgtagattgtaatatgtacatctgcggagattctactgaatgtgctaatttgcttctccaatatggtagcttttgcacacaactaaatcgtgcactctcaggtattgctgctgaacaggatcgcaacacacgtgaagtgttcgctcaagtcaaacaaatgtacaaaaccccaactttgaaatattttggtggttttaatttttcacaaatattacctgaccctctaaagccaactaagaggtcttttattgaggacttgctctttaataaggtgacactcgctgatgctggcttcatgaagcaatatggcgaatgcctaggtgatattaatgctagagatctcatttgtgcgcagaagttcaatggacttacagtgttgccacctctgctcactgatgatatgattgctgcctacactgctgctctagttagtggtactgccactgctggatggacatttggtgctggcgctgctcttcaaataccttttgctatgcaaatggcatataggttcaatggcattggagttacccaaaatgttctctatgagaaccaaaaacaaatcgccaaccaatttaacaaggcgattagtcaaattcaagaatcacttacaacaacatcaactgcattgggcaagctgcaagacgttgttaaccagaatgctcaagcattaaacacacttgttaaacaacttagctctaattttggtgcaatttcaagtgtgctaaatgatatcctttcgcgacttgataaagtcgaggcggaggtacaaattgacaggttaattacaggcagacttcaaagccttcaaacctatgtaacacaacaactaatcagggctgctgaaatcagggcttctgctaatcttgctgctactaaaatgtctgagtgtgttcttggacaatcaaaaagagttgacttttgtggaaagggctaccaccttatgtccttcccacaagcagccccgcatggtgttgtcttcctacatgtcacgtatgtgccatcccaggagaggaacttcaccacagcgccagcaatttgtcatgaaggcaaagcatacttccctcgtgaaggtgtttttgtgtttaatggcacttcttggtttattacacagaggaacttcttttctccacaaataattactacagacaatacatttgtctcaggaaattgtgatgtcgttattggcatcattaacaacacagtttatgatcctctgcaacctgagcttgactcattcaaagaagagctggacaagtacttcaaaaatcatacatcaccagatgttgatcttggcgacatttcaggcattaacgcttctgtcgtcaacattcaaaaagaaattgaccgcctcaatgaggtcgctaaaaatttaaatgaatcactcattgaccttcaagaattgggaaaatatgagcaatatattaaatggccttggtatgtttggctcggcttcattgctggactaattgccatcgtcatggttacaatcttgctttgttgcatgactagttgttgcagttgcctcaagggtgcatgctcttgtggttcttgctgcaagtttgatgaggatgactctgagccagttctcaagggtgtcaaattacattacacataaacgaacttatggatttgtttatgagattttttactcttggatcaattactgcacagccagtaaaaattgacaatgcttctcctgcaagtactgttcatgctacagcaacgataccgctacaagcctcactccctttcggatggcttgttattggcgttgcatttcttgctgtttttcagagcgctaccaaaataattgcgctcaataaaagatggcagctagccctttataagggcttccagttcatttgcaatttactgctgctatttgttaccatctattcacatcttttgcttgtcgctgcaggtatggaggcgcaatttttgtacctctatgccttgatatattttctacaatgcatcaacgcatgtagaattattatgagatgttggctttgttggaagtgcaaatccaagaacccattactttatgatgccaactactttgtttgctggcacacacataactatgactactgtataccatataacagtgtcacagatacaattgtcgttactgaaggtgacggcatttcaacaccaaaactcaaagaagactaccaaattggtggttattctgaggataggcactcaggtgttaaagactatgtcgttgtacatggctatttcaccgaagtttactaccagcttgagtctacacaaattactacagacactggtattgaaaatgctacattcttcatctttaacaagcttgttaaagacccaccgaatgtgcaaatacacacaatcgacggctcttcaggagttgctaatccagcaatggatccaatttatgatgagccgacgacgactactagcgtgcctttgtaagcacaagaaagtgagtacgaacttatgtactcattcgtttcggaagaaacaggtacgttaatagttaatagcgtacttctttttcttgctttcgtggtattcttgctagtcacactagccatccttactgcgcttcgattgtgtgcgtactgctgcaatattgttaacgtgagtttagtaaaaccaacggtttacgtctactcgcgtgttaaaaatctgaactcttctgaaggagttcctgatcttctggtctaaacgaactaactattattattattctgtttggaactttaacattgcttatcatggcagacaacggtactattaccgttgaggagcttaaacaactcctggaacaatggaacctagtaataggtttcctatgcctagcctggattatgttactacaatttgcctattctaatcggaacaggtttttgtacataataaagcttgttttcctctggctcttgtggccagtaacacttgcttgttttgtgcttgctgctgtctacagaattaattgggtgactggcgggattgcgattgcaatggcttgtattgtaggcttgatgtggcttagctacttcgttgcttccttcaggctgtttgctcgtacccgctcaatgtggtcattcaacccagaaacaaacattcttctcaatgtgcctctccgggggacaattgtgaccagaccgctcatggaaagtgaacttgtcattggtgctgtgatcattcgtggtcacttgcgaatggccggacactccctagggcgctgtgacattaaggacctgccaaaagagatcactgtggctacatcacgaacgctttcttattacaaattaggagcgtcgcagcgtgtaggcactgattcaggttttgctgcatacaaccgctaccgtattggaaactataaattaaatacagaccacgccggtagcaacgacaatattgctttgctagtacagtaagtgacaacagatgtttcatcttgttgacttccaggttacaatagcagagatattgattatcattatgaggactttcaggattgctatttggaatcttgacgttataataagttcaatagtgagacaattatttaagcctctaactaagaagaattattcggagttagatgatgaagaacctatggagttagattatccataaaacgaacatgaaaattattctcttcctgacattgattgtatttacatcttgcgagctatatcactatcaggagtgtgttagaggtacgactgtactactaaaagaaccttgcccatcaggaacatacgagggcaattcaccatttcaccctcttgctgacaataaatttgcactaacttgcactagcacacactttgcttttgcttgtgctgacggtactcgacatacctatcagctgcgtgcaagatcagtttcaccaaaacttttcatcagacaagaggaggttcaacaagagctctactcgccactttttctcattgttgctgctctagtatttttaatactttgcttcaccattaagagaaagacagaatgaatgagctcactttaattgacttctatttgtgctttttagcctttctgctattccttgttttaataatgcttattatattttggttttcactcgaaatccaggatctagaagaaccttgtaccaaagtctaaacgaacatgaaacttctcattgttttgacttgtatttctctatgcagttgcatatgcactgtagtacagcgctgtgcatctaataaacctcatgtgcttgaagatccttgtaaggtacaacactaggggtaatacttatagcactgcttggctttgtgctctaggaaaggttttaccttttcatagatggcacactatggttcaaacatgcacacctaatgttactatcaactgtcaagatccagctggtggtgcgcttatagctaggtgttggtaccttcatgaaggtcaccaaactgctgcatttagagacgtacttgttgttttaaataaacgaacaaattaaaatgtctgataatggaccccaatcaaaccaacgtagtgccccccgcattacatttggtggacccacagattcaactgacaataaccagaatggaggacgcaatggggcaaggccaaaacagcgccgaccccaaggtttacccaataatactgcgtcttggttcacagctctcactcagcatggcaaggaggaacttagattccctcgaggccagggcgttccaatcaacaccaatagtggtccagatgaccaaattggctactaccgaagagctacccgacgagttcgtggtggtgacggcaaaatgaaagagctcagccccagatggtacttctattacctaggaactggcccagaagcttcacttccctacggcgctaacaaagaaggcatcgtatgggttgcaactgagggagccttgaatacacccaaagaccacattggcacccgcaatcctaataacaatgctgccaccgtgctacaacttcctcaaggaacaacattgccaaaaggcttctacgcagagggaagcagaggcggcagtcaagcctcttctcgctcctcatcacgtagtcgcggtaattcaagaaattcaactcctggcagcagtaggggaaattctcctgctcgaatggctagcggaggtggtgaaactgccctcgcgctattgctgctagacagattgaaccagcttgagagcaaagtttctggtaaaggccaacaacaacaaggccaaactgtcactaagaaatctgctgctgaggcatctaaaaagcctcgccaaaaacgtactgccacaaaacagtacaacgtcactcaagcatttgggagacgtggtccagaacaaacccaaggaaatttcggggaccaagacctaatcagacaaggaactgattacaaacattggccgcaaattgcacaatttgctccaagtgcctctgcattctttggaatgtcacgcattggcatggaagtcacaccttcgggaacatggctgacttatcatggagccattaaattggatgacaaagatccacaattcaaagacaacgtcatactgctgaacaagcacattgacgcatacaaaacattcccaccaacagagcctaaaaaggacaaaaagaaaaagactgatgaagctcagcctttgccgcagagacaaaagaagcagcccactgtgactcttcttcctgcggctgacatggatgatttctccagacaacttcaaaattccatgagtggagcttctgctgattcaactcaggcataaacactcatgatgaccacacaaggcagatgggctatgtaaacgttttcgcaattccgtttacgatacatagtctactcttgtgcagaatgaattctcgtaactaaacagcacaagtaggtttagttaactttaatctcacatagcaatctttaatcaatgtgtaacattagggaggacttgaaagagccaccacattttcatcgaggccacgcggagtacgatcgagggtacagtgaataatgctagggagagct

SEQ ID NO: 71 - DNA, 29573 bp, Coronavirus
aactttaaaatctgtgtagctgtcgctcggctgcatgcctagtgcacctacgcagtataaacaataataaattttactgtcgttgacaagaaacgagtaactcgtccctcttctgcagactgcttacggtttcgtccgtgttgcagtcgatcatcagcatacctaggtttcgtccgggtgtgaccgaaaggtaagatggagagccttgttcttggtgtcaacgagaaaacacacgtccaactcagtttgcctgtccttcaggttagagacgtgctagtgcgtggcttcggggactctgtggaagaggccctatcggaggcacgtgaacacctcaaaaatggcacttgtggtctagtagagctggaaaaaggcgtactgccccagcttgaacagccctatgtgttcattaaacgttctgatgccttaagcaccaatcacggccacaaggtcgttgagctggttgcagaaatggacggcattcagtacggtcgtagcggtataacactgggagtactcgtgccacatgtgggcgaaaccccaattgcataccgcaatgttcttcttcgtaagaacggtaataagggagccggtggtcatagctatggcatcgatctaaagtcttatgacttaggtgacgagcttggcactgatcccattgaagattatgaacaaaactggaacactaagcatggcagtggtgcactccgtgaactcactcgtgagctcaatggaggtgcagtcactcgctatgtcgacaacaatttctgtggcccagatgggtaccctcttgattgcatcaaagattttctcgcacgcgcgggcaagtcaatgtgcactctttccgaacaacttgattacatcgagtcgaagagaggtgtctactgctgccgtgaccatgagcatgaaattgcctggttcactgagcgctctgataagagctacgagcaccagacacccttcgaaattaagagtgccaagaaatttgacactttcaaaggggaatgcccaaagtttgtgtttcctcttaactcaaaagtcaaagtcattcaaccacgtgttgaaaagaaaaagactgagggtttcatggggcgtatacgctctgtgtaccctgttgcatctccacaggagtgtaacaatatgcacttgtctaccttgatgaaatgtaatcattgcgatgaagtttcatggcagacgtgcgactttctgaaagccacttgtgaacattgtggcactgaaaatttagttattgaaggacctactacatgtgggtacctacctactaatgctgtagtgaaaatgccatgtcctgcctgtcaagacccagagattggacctgagcatagtgttgcagattatcacaaccactcaaacattgaaactcgactccgcaagggaggtaggactagatgttttggaggctgtgtgtttgcctatgttggctgctataataagcgtgcctactgggttcctcgtgctagtgctgatattggctcaggccatactggcattactggtgacaatgtggagaccttgaatgaggatctccttgagatactgagtcgtgaacgtgttaacattaacattgttggcgattttcatttgaatgaagaggttgccatcattttggcatctttctctgcttctacaagtgcctttattgacactataaagagtcttgattacaagtctttcaaaaccattgttgagtcctgcggtaactataaagttaccaagggaaagcccgtaaaaggtgcttggaacattggacaacagagatcagttttaacaccactgtgtggttttccctcacaggctgctggtgttatcagatcaatttttgcgcgcacacttgatgcagcaaaccactcaattcctgatttgcaaagagcagctgtcaccatacttgatggtatttctgaacagtcattacgtcttgtcgacgccatggtttatacttcagacctgctcaccaacagtgtcattattatggcatatgtaactggtggtcttgtacaacagacttctcagtggttgtctaatcttttgggcactactgttgaaaaactcaggcctatctttgaatggattgaggcgaaacttagtgcaggagttgaatttctcaaggatgcttgggagattctcaaatttctcattacaggtgtttttgacatcgtcaagggtcaaatacaggttgcttcagataacatcaaggattgtgtaaaatgcttcattgatgttgttaacaaggcactcgaaatgtgcattgatcaagtcactatcgctggcgcaaagttgcgatcactcaacttaggtgaagtcttcatcgctcaaagcaagggactttaccgtcagtgtatacgtggcaaggagcagctgcaactactcatgcctcttaaggcaccaaaagaagtaacctttcttgaaggtgattcacatgacacagtacttacctctgaggaggttgttctcaagaacggtgaactcgaagcactcgagacgcccgttgatagcttcacaaatggagctatcgttggcacaccagtctgtgtaaatggcctcatgctcttagagattaaggacaaagaacaatactgcgcattgtctcctggtttactggctacaaacaatgtctttcgcttaaaagggggtgcaccaattaaaggtgtaacctttggagaagatactgtttgggaagttcaaggttacaagaatgtgagaatcacatttgagcttgatgaacgtgttgacaaagtgcttaatgaaaagtgctctgtctacactgttgaatccggtaccgaagttactgagtttgcatgtgttgtagcagaggctgttgtgaagactttacaaccagtttctgatctccttaccaacatgggtattgatcttgatgagtggagtgtagctacattctacttatttgatgatgctggtgaagaaaacttttcatcacgtatgtattgttccttttaccctccagatgaggaagaagaggacgatgcagagtgtgaggaagaagaaattgatgaaacctgtgaacatgagtacggtacagaggatgattatcaaggtctccctctggaatttggtgcctcagctgaaacagttcgagttgaggaagaagaagaggaagactggctggatgatactactgagcaatcagagattgagccagaaccagaacctacacctgaagaaccagttaatcagtttactggttatttaaaacttactgacaatgttgccattaaatgtgttgacatcgttaaggaggcacaaagtgctaatcctatggtgattgtaaatgctgctaacatacacctgaaacatggtggtggtgtagcaggtgcactcaacaaggcaaccaatggtgccatgcaaaaggagagtgatgattacattaagctaaatggccctcttacagtaggagggtcttgtttgctttctggacataatcttgctaagaagtgtctgcatgttgttggacctaacctaaatgcaggtgaggacatccagcttcttaaggcagcatatgaaaatttcaattcacaggacatcttacttgcaccattgttgtcagcaggcatatttggtgctaaaccacttcagtctttacaagtgtgcgtgcagacggttcgtacacaggtttatattgcagtcaatgacaaagctctttatgagcaggttgtcatggattatcttgataacctgaagcctagagtggaagcacctaaacaagaggagccaccaaacacagaagattccaaaactgaggagaaatccgtcgtacagaagcctgtcgatgtgaagccaaaaattaaggcctgcattgatgaggttaccacaacactggaagaaactaagtttcttaccaataagttactcttgtttgctgatatcaatggtaagctttaccatgattctcagaacatgcttagaggtgaagatatgtctttccttgagaaggatgcaccttacatggtaggtgatgttatcactagtggtgatatcacttgtgttgtaataccctccaaaaaggctggtggcactactgagatgctctcaagagctttgaagaaagtgccagttgatgagtatataaccacgtaccctggacaaggatgtgctggttatacacttgaggaagctaagactgctcttaagaaatgcaaatctgcattttatgtactaccttcagaagcacctaatgctaaggaagagattctaggaactgtatcctggaatttgagagaaatgcttgctcatgctgaagagacaagaaaattaatgcctatatgcatggatgttagagccataatggcaaccatccaacgtaagtataaaggaattaaaattcaagagggcatcgttgactatggtgtccgattcttcttttatactagtaaagagcctgtagcttctattattacgaagctgaactctctaaatgagccgcttgtcacaatgccaattggttatgtgacacatggttttaatcttgaagaggctgcgcgctgtatgcgttctcttaaagctcctgccgtagtgtcagtatcatcaccagatgctgttactacatataatggatacctcacttcgtcatcaaagacatctgaggagcactttgtagaaacagtttctttggctggctcttacagagattggtcctattcaggacagcgtacagagttaggtgttgaatttcttaagcgtggtgacaaaattgtgtaccacactctggagagccccgtcgagtttcatcttgacggtgaggttctttcacttgacaaactaaagagtctcttatccctgcgggaggttaagactataaaagtgttcacaactgtggacaacactaatctccacacacagcttgtggatatgtctatgacatatggacagcagtttggtccaacatacttggatggtgctgatgttacaaaaattaaacctcatgtaaatcatgagggtaagactttctttgtactacctagtgatgacacactacgtagtgaagctttcgagtactaccatactcttgatgagagttttcttggtaggtacatgtctgctttaaaccacacaaagaaatggaaatttcctcaagttggtggtttaacttcaattaaatgggctgataacaattgttatttgtctagtgttttattagcacttcaacagcttgaagtcaaattcaatgcaccagcacttcaagaggcttattatagagcccgtgctggtgatgctgctaacttttgtgcactcatactcgcttacagtaataaaactgttggcgagcttggtgatgtcagagaaactatgacccatcttctacagcatgctaatttggaatctgcaaagcgagttcttaatgtggtgtgtaaacattgtggtcagaaaactactaccttaacgggtgtagaagctgtgatgtatatgggtactctatcttatgataatcttaagacaggtgtttccattccatgtgtgtgtggtcgtgatgctacacaatatctagtacaacaagagtcttcttttgttatgatgtctgcaccacctgctgagtataaattacagcaaggtacattcttatgtgcgaatgagtacactggtaactatcagtgtggtcattacactcatataactgctaaggagaccctctatcgtattgacggagctcaccttacaaagatgtcagagtacaaaggaccagtgactgatgttttctacaaggaaacatcttacactacaaccatcaagcctgtgtcgtataaactcgatggagttacttacacagagattgaaccaaaattggatgggtattataaaaaggataatgcttactatacagagcagcctatagaccttgtaccaactcaaccattaccaaatgcgagttttgataatttcaaactcacatgttctaacacaaaatttgctgatgatttaaatcaaatgacaggcttcacaaagccagcttcacgagagctatctgtcacattcttcccagacttgaatggcgatgtagtggctattgactatagacactattcagcgagtttcaagaaaggtgctaaattactgcataagccaattgtttggcacattaaccaggctacaaccaagacaacgttcaaaccaaacacttggtgtttacgttgtctttggagtacaaagccagtagatacttcaaattcatttgaagttctggcagtagaagacacacaaggaatggacaatcttgcttgtgaaagtcaacaacccacctctgaagaagtagtggaaaatcctaccatacagaaggaagtcatagagtgtgacgtgaaaactaccgaagttgtaggcaatgtcatacttaaaccatcagatgaaggtgttaaagtaacacaagagttaggtcatgaggatcttatggctgcttatgtggaaaacacaagcattaccattaagaaacctaatgagctttcactagccttaggtttaaaaacaattgccactcatggtattgctgcaattaatagtgttccttggagtaaaattttggcttatgtcaaaccattcttaggacaagcagcaattacaacatcaaattgcgctaagagattagcacaacgtgtgtttaacaattatatgccttatgtgtttacattattgttccaattgtgtacttttactaaaagtaccaattctagaattagagcttcactacctacaactattgctaaaaatagtgttaagagtgttgctaaattatgtttggatgccggcattaattatgtgaagtcacccaaattttctaaattgttcacaatcgctatgtggctattgttgttaagtatttgcttaggttctctaatctgtgtaactgctgcttttggtgtactcttatctaattttggtgctccttcttattgtaatggcgttagagaattgtatcttaattcgtctaacgttactactatggatttctgtgaaggttcttttccttgcagcatttgtttaagtggattagactcccttgattcttatccagctcttgaaaccattcaggtgacgatttcatcgtacaagctagacttgacaattttaggtctggccgctgagtgggttttggcatatatgttgttcacaaaattcttttatttattaggtctttcagctataatgcaggtgttctttggctattttgctagtcatttcatcagcaattcttggctcatgtggtttatcattagtattgtacaaatggcacccgtttctgcaatggttaggatgtacatcttctttgcttctttctactacatatggaagagctatgttcatatcatggatggttgcacctcttcgacttgcatgatgtgctataagcgcaatcgtgccacacgcgttgagtgtacaactattgttaatggcatgaagagatctttctatgtctatgcaaatggaggccgtggcttctgcaagactcacaattggaattgtctcaattgtgacacattttgcactggtagtacattcattagtgatgaagttgctcgtgatttgtcactccagtttaaaagaccaatcaaccctactgaccagtcatcgtatattgttgatagtgttgctgtgaaaaatggcgcgcttcacctctactttgacaaggctggtcaaaagacctatgagagacatccgctctcccattttgtcaatttagacaatttgagagctaacaacactaaaggttcactgcctattaatgtcatagtttttgatggcaagtccaaatgcgacgagtctgcttctaagtctgcttctgtgtactacagtcagctgatgtgccaacctattctgttgcttgaccaagttcttgtatcagacgttggagatagtactgaagtttccgttaagatgtttgatgcttatgtcgacaccttttcagcaacttttagtgttcctatggaaaaacttaaggcacttgttgctacagctcacagcgagttagcaaagggtgtagctttagatggtgtcctttctacattcgtgtcagctgcccgacaaggtgttgttgataccgatgttgacacaaaggatgttattgaatgtcttaaactttcacatcactctgacttagaagtgacaggtgacagttgtaacaatttcatgctcacctataataaggttgaaaacatgacgcccagagatcttggcgcatgtattgactgtaatgcaaggcatatcaatgcccaagtagcaaaaagtcacaatgtttcactcatctggaatgtaaaagactacatgtctttatctgaacagctgcgtaaacaaattcgtagtgctgccaagaagaacaacataccttttagactaacttgtgctacaactagacaggttgtcaatgtcataactactaaaatctcactcaagggtggtaagattgttagtacttgttttaaacttatgcttaaggccacattattgtgcgttcttgctgcattggtttgttatatcgttatgccagtacatacattgtcaatccatgatggttacacaaatgaaatcattggttacaaagccattcaggatggtgtcactcgtgacatcatttctactgatgattgttttgcaaataaacatgctggttttgacgcatggtttagccagcgtggtggttcatacaaaaatgacaaaagctgccctgtagtagctgctatcattacaagagagattggtttcatagtgcctggcttaccgggtactgtgctgagagcaatcaatggtgacttcttgcattttctacctcgtgtttttagtgctgttggcaacatttgctacacaccttccaaactcattgagtatagtgattttgctacctctgcttgcgttcttgctgctgagtgtacaatttttaaggatgctatgggcaaacctgtgccatattgttatgacactaatttgctagagggttctatttcttatagtgagcttcgtccagacactcgttatgtgcttatggatggttccatcatacagtttcctaacacttacctggagggttctgttagagtagtaacaacttttgatgctgagtactgtagacatggtacatgcgaaaggtcagaagtaggtatttgcctatctaccagtggtagatgggttcttaataatgagcattacagagctctatcaggagttttctgtggtgttgatgcgatgaatctcatagctaacatctttactcctcttgtgcaacctgtgggtgctttagatgtgtctgcttcagtagtggctggtggtattattgccatattggtgacttgtgctgcctactactttatgaaattcagacgtgtttttggtgagtacaaccatgttgttgctgctaatgcacttttgtttttgatgtctttcactatactctgtctggtaccagcttacagctttctgccgggagtctactcagtcttttacttgtacttgacattctatttcaccaatgatgtttcattcttggctcaccttcaatggtttgccatgttttctcctattgtgcctttttggataacagcaatctatgtattctgtatttctctgaagcactgccattggttctttaacaactatcttaggaaaagagtcatgtttaatggagttacatttagtaccttcgaggaggctgctttgtgtacctttttgctcaacaaggaaatgtacctaaaattgcgtagcgagacactgttgccacttacacagtataacaggtatcttgctctatataacaagtacaagtatttcagtggagccttagatactaccagctatcgtgaagcagcttgctgccacttagcaaaggctctaaatgactttagcaactcaggtgctgatgttctctaccaaccaccacagacatcaatcacttctgctgttctgcagagtggttttaggaaaatggcattcccgtcaggcaaagttgaagggtgcatggtacaagtaacctgtggaactacaactcttaatggattgtggttggatgacacagtatactgtccaagacatgtcatttgcacagcagaagacatgcttaatcctaactatgaagatctgctcattcgcaaatccaaccatagctttcttgttcaggctggcaatgttcaacttcgtgttattggccattctatgcaaaattgtctgcttaggcttaaagttgatacttctaaccctaagacacccaagtataaatttgtccgtatccaacctggtcaaacattttcagttctagcatgctacaatggttcaccatctggtgtttatcagtgtgccatgagacctaatcataccattaaaggttctttccttaatggatcatgtggtagtgttggttttaacattgattatgattgcgtgtctttctgctatatgcatcatatggagcttccaacaggagtacacgctggtactgacttagaaggtaaattctatggtccatttgttgacagacaaactgcacaggctgcaggtacagacacaaccataacattaaatgttttggcatggctgtatgctgctgttatcaatggtgataggtggtttcttaatagattcaccactactttgaatgactttaaccttgtggcaatgaagtacaactatgaacctttgacacaagatcatgttgacatattgggacctctttctgctcaaacaggaattgccgtcttagatatgtgtgctgctttgaaagagctgctgcagaatggtatgaatggtcgtactatccttggtagcactattttagaagatgagtttacaccatttgatgttgttagacaatgctctggtgttaccttccaaggtaagttcaagaaaattgttaagggcactcatcattggatgcttttaactttcttgacatcactattgattcttgttcaaagtacacagtggtcactgtttttctttgtttacgagaatgctttcttgccatttactcttggtattatggcaattgctgcatgtgctatgctgcttgttaagcataagcacgcattcttgtgcttgtttctgttaccttctcttgcaacagttgcttactttaatatggtctacatgcctgctagctgggtgatgcgtatcatgacatggcttgaattggctgacactagcttgtctggttataggcttaaggattgtgttatgtatgcttcagctttagttttgcttattctcatgacagctcgcactgtttatgatgatgctgctagacgtgtttggacactgatgaatgtcattacacttgtttacaaagtctactatggtaatgctttagatcaagctatttccatgtgggccttagttatttctgtaacctctaactattctggtgtcgttacgactatcatgtttttagctagagctatagtgtttgtgtgtgttgagtattatccattgttatttattactggcaacaccttacagtgtatcatgcttgtttattgtttcttaggctattgttgctgctgctactttggccttttctgtttactcaaccgttacttcaggcttactcttggtgtttatgactacttggtctctacacaagaatttaggtatatgaactcccaggggcttttgcctcctaagagtagtattgatgctttcaagcttaacattaagttgttgggtattggaggtaaaccatgtatcaaggttgctactgtacagtctaaaatgtctgacgtaaagtgcacatctgtggtactgctctcggttcttcaacaacttagagtagagtcatcttctaaattgtgggcacaatgtgtacaactccacaatgatattcttcttgcaaaagacacaactgaagctttcgagaagatggtttctcttttgtctgttttgctatccatgcagggtgctgtagacattaataggttgtgcgaggaaatgctcgataaccgtgctactcttcaggctattgcttcagaatttagttctttaccatcatatgccgcttatgccactgcccaggaggcctatgagcaggctgtagctaatggtgattctgaagtcgttctcaaaaagttaaagaaatctttgaatgtggctaaatctgagtttgaccgtgatgctgccatgcaacgcaagttggaaaagatggcagatcaggctatgacccaaatgtacaaacaggcaagatctgaggacaagagggcaaaagtaactagtgctatgcaaacaatgctcttcactatgcttaggaagcttgataatgatgcacttaacaacattatcaacaatgcgcgtgatggttgtgttccactcaacatcataccattgactacagcagccaaactcatggttgttgtccctgattatggtacctacaagaacacttgtgatggtaacacctttacatatgcatctgcactctgggaaatccagcaagttgttgatgcggatagcaagattgttcaacttagtgaaattaacatggacaattcaccaaatttggcttggcctcttattgttacagctctaagagccaactcagctgttaaactacagaataatgaactgagtccagtagcactacgacagatgtcctgtgcggctggtaccacacaaacagcttgtactgatgacaatgcacttgcctactataacaattcgaagggaggtaggtttgtgctggcattactatcagaccaccaagatctcaaatgggctagattccctaagagtgatggtacaggtacaatttacacagaactggaaccaccttgtaggtttgttacagacacaccaaaagggcctaaagtgaaatacttgtacttcatcaaaggcttaaacaacctaaatagaggtatggtgctgggcagtttagctgctacagtacgtcttcaggctggaaatgctacagaagtacctgccaattcaactgtgctttccttctgtgcttttgcagtagaccctgctaaagcatataaggattacctagcaagtggaggacaaccaatcaccaactgtgtgaagatgttgtgtacacatactggtacaggacaggcaattactgtaacaccagaagctaacatggaccaagagtcctttggtggtgcttcatgttgtctgtattgtagatgccacattgaccatccaaatcctaaaggattctgtgacttgaaaggtaagtacgtccaaatacctaccacttgtgctaatgacccagtgggttttacacttagaaacacagtctgtaccgtctgcggaatgtggaaaggttatggctgtagttgtgaccaactccgcgaacccttgatgcagtctgcggatgcatcaacgtttttaaacgggtttgcggtgtaagtgcagcccgtcttacaccgtgcggcacaggcactagtactgatgtcgtctacagggcttttgatatttacaacgaaaaagttgctggttttgcaaagttcctaaaaactaattgctgtcgcttccaggagaaggatgaggaaggcaatttattagactcttactttgtagttaagaggcatactatgtctaactaccaacatgaagagactatttataacttggttaaagattgtccagcggttgctgtccatgactttttcaagtttagagtagatggtgacatggtaccacatatatcacgtcagcgtctaactaaatacacaatggctgatttagtctatgctctacgtcattttgatgagggtaattgtgatacattaaaagaaatactcgtcacatacaattgctgtgatgatgattatttcaataagaaggattggtatgacttcgtagagaatcctgacatcttacgcgtatatgctaacttaggtgagcgtgtacgccaatcattattaaagactgtacaattctgcgatgctatgcgtgatgcaggcattgtaggcgtactgacattagataatcaggatcttaatgggaactggtacgatttcggtgatttcgtacaagtagcaccaggctgcggagttcctattgtggattcatattactcattgctgatgcccatcctcactttgactagggcattggctgctgagtcccatatggatgctgatctcgcaaaaccacttattaagtgggatttgctgaaatatgattttacggaagagagactttgtctcttcgaccgttattttaaatattgggaccagacataccatcccaattgtattaactgtttggatgataggtgtatccttcattgtgcaaactttaatgtgttattttctactgtgtttccacctacaagttttggaccactagtaagaaaaatatttgtagatggtgttccttttgttgtttcaactggataccattttcgtgagttaggagtcgtacataatcaggatgtaaacttacatagctcgcgtctcagtttcaaggaacttttagtgtatgctgctgatccagctatgcatgcagcttctggcaatttattgctagataaacgcactacatgcttttcagtagctgcactaacaaacaatgttgcttttcaaactgtcaaacccggtaattttaataaagacttttatgactttgctgtgtctaaaggtttctttaaggaaggaagttctgttgaactaaaacacttcttctttgctcaggatggcaacgctgctatcagtgattatgactattatcgttataatctgccaacaatgtgtgatatcagacaactcctattcgtagttgaagttgttgataaatactttgattgttacgatggtggctgtattaatgccaaccaagtaatcgttaacaatctggataaatcagctggtttcccatttaataaatggggtaaggctagactttattatgactcaatgagttatgaggatcaagatgcacttttcgcgtatactaagcgtaatgtcatccctactataactcaaatgaatcttaagtatgccattagtgcaaagaatagagctcgcaccgtagctggtgtctctatctgtagtactatgacaaatagacagtttcatcagaaattattgaagtcaatagccgccactagaggagctactgtggtaattggaacaagcaagttttacggtggctggcataatatgttaaaaactgtttacagtgatgtagaaactccacaccttatgggttgggattatccaaaatgtgacagagccatgcctaacatgcttaggataatggcctctcttgttcttgctcgcaaacataacacttgctgtaacttatcacaccgtttctacaggttagctaacgagtgtgcgcaagtattaagtgagatggtcatgtgtggcggctcactatatgttaaaccaggtggaacatcatccggtgatgctacaactgcttatgctaatagtgtctttaacatttgtcaagctgttacagccaatgtaaatgcacttctttcaactgatggtaataagatagctgacaagtatgtccgcaatctacaacacaggctctatgagtgtctctatagaaatagggatgttgatcatgaattcgtggatgagttttacgcttacctgcgtaaacatttctccatgatgattctttctgatgatgccgttgtgtgctataacagtaactatgcggctcaaggtttagtagctagcattaagaactttaaggcagttctttattatcaaaataatgtgttcatgtctgaggcaaaatgttggactgagactgaccttactaaaggacctcacgaattttgctcacagcatacaatgctagttaaacaaggagatgattacgtgtacctgccttacccagatccatcaagaatattaggcgcaggctgttttgtcgatgatattgtcaaaacagatggtacacttatgattgaaaggttcgtgtcactggctattgatgcttacccacttacaaaacatcctaatcaggagtatgctgatgtctttcacttgtatttacaatacattagaaagttacatgatgagcttactggccacatgttggacatgtattccgtaatgctaactaatgataacacctcacggtactgggaacctgagttttatgaggctatgtacacaccacatacagtcttgcaggctgtaggtgcttgtgtattgtgcaattcacagacttcacttcgttgcggtgcctgtattaggagaccattcctatgttgcaagtgctgctatgaccatgtcatttcaacatcacacaaattagtgttgtctgttaatccctatgtttgcaatgccccaggttgtgatgtcactgatgtgacacaactgtatctaggaggtatgagctattattgcaagtcacataagcctcccattagttttccattatgtgctaatggtcaggtttttggtttatacaaaaacacatgtgtaggcagtgacaatgtcactgacttcaatgcgatagcaacatgtgattggactaatgctggcgattacatacttgccaacacttgtactgagagactcaagcttttcgcagcagaaacgctcaaagccactgaggaaacatttaagctgtcatatggtattgccactgtacgcgaagtactctctgacagagaattgcatctttcatgggaggttggaaaacctagaccaccattgaacagaaactatgtctttactggttaccgtgtaactaaaaatagtaaagtacagattggagagtacacctttgaaaaaggtgactatggtgatgctgttgtgtacagaggtactacgacatacaagttgaatgttggtgattactttgtgttgacatctcacactgtaatgccacttagtgcacctactctagtgccacaagagcactatgtgagaattactggcttgtacccaacactcaacatctcagatgagttttctagcaatgttgcaaattatcaaaaggtcggcatgcaaaagtactctacactccaaggaccacctggtactggtaagagtcattttgccatcggacttgctctctattacccatctgctcgcatagtgtatacggcatgctctcatgcagctgttgatgccctatgtgaaaaggcattaaaatatttgcccatagataaatgtagtagaatcatacctgcgcgtgcgcgcgtagagtgttttgataaattcaaagtgaattcaacactagaacagtatgttttctgcactgtaaatgcattgccagaaacaactgctgacattgtagtctttgatgaaatctctatggctactaattatgacttgagtgttgtcaatgctagacttcgtgcaaaacactacgtctatattggcgatcctgctcaattaccagccccccgcacattgctgactaaaggcacactagaaccagaatattttaattcagtgtgcagacttatgaaaacaataggtccagacatgttccttggaacttgtcgccgttgtcctgctgaaattgttgacactgtgagtgctttagtttatgacaataagctaaaagcacacaaggataagtcagctcaatgcttcaaaatgttctacaaaggtgttattacacatgatgtttcatctgcaatcaacagacctcaaataggcgttgtaagagaatttcttacacgcaatcctgcttggagaaaagctgtttttatctcaccttataattcacagaacgctgtagcttcaaaaatcttaggattgcctacgcagactgttgattcatcacagggttctgaatatgactatgtcatattcacacaaactactgaaacagcacactcttgtaatgtcaaccgcttcaatgtggctatcacaagggcaaaaattggcattttgtgcataatgtctgatagagatctttatgacaaactgcaatttacaagtctagaaataccacgtcgcaatgtggctacattacaagcagaaaatgtaactggactttttaaggactgtagtaagatcattactggtcttcatcctacacaggcacctacacacctcagcgttgatataaagttcaagactgaaggattatgtgttgacataccaggcataccaaaggacatgacctaccgtagactcatctctatgatgggtttcaaaatgaattaccaagtcaatggttaccctaatatgtttatcacccgcgaagaagctattcgtcacgttcgtgcgtggattggctttgatgtagagggctgtcatgcaactagagatgctgtgggtactaacctacctctccagctaggattttctacaggtgttaacttagtagctgtaccgactggttatgttgacactgaaaataacacagaattcaccagagttaatgcaaaacctccaccaggtgaccagtttaaacatcttataccactcatgtataaaggcttgccctggaatgtagtgcgtattaagatagtacaaatgctcagtgatacactgaaaggattgtcagacagagtcgtgttcgtcctttgggcgcatggctttgagcttacatcaatgaagtactttgtcaagattggacctgaaagaacgtgttgtctgtgtgacaaacgtgcaacttgcttttctacttcatcagatacttatgcctgctggaatcattctgtgggttttgactatgtctataacccatttatgattgatgttcagcagtggggctttacgggtaaccttcagagtaaccatgaccaacattgccaggtacatggaaatgcacatgtggctagttgtgatgctatcatgactagatgtttagcagtccatgagtgctttgttaagcgcgttgattggtctgttgaataccctattataggagatgaactgagggttaattctgcttgcagaaaagtacaacacatggttgtgaagtctgcattgcttgctgataagtttccagttcttcatgacattggaaatccaaaggctatcaagtgtgtgcctcaggctgaagtagaatggaagttctacgatgctcagccatgtagtgacaaagcttacaaaatagaggagctcttctattcttatgctacacatcacgataaattcactgatggtgtttgtttgttttggaattgtaacgttgatcgttacccagccaatgcaattgtgtgtaggtttgacacaagagtcttgtcaaacttgaacttaccaggctgtgatggtggtagtttgtatgtgaataagcatgcattccacactccagctttcgataaaagtgcatttactaatttaaagcaattgcctttcttttactattctgatagtccttgtgagtctcatggcaaacaagtagtgtcggatattgattatgttccactcaaatctgctacgtgtattacacgatgcaatttaggtggtgctgtttgcagacaccatgcaaatgagtaccgacagtacttggatgcatataatatgatgatttctgctggatttagcctatggatttacaaacaatttgatacttataacctgtggaatacatttaccaggttacagagtttagaaaatgtggcttataatgttgttaataaaggacactttgatggacacgccggcgaagcacctgtttccatcattaataatgctgtttacacaaaggtagatggtattgatgtggagatctttgaaaataagacaacacttcctgttaatgttgcatttgagctttgggctaagcgtaacattaaaccagtgccagagattaagatactcaataatttgggtgttgatatcgctgctaatactgtaatctgggactacaaaagagaagccccagcacatgtatctacaataggtgtctgcacaatgactgacattgccaagaaacctactgagagtgcttgttcttcacttactgtcttgtttgatggtagagtggaaggacaggtagacctttttagaaacgcccgtaatggtgttttaataacagaaggttcagtcaaaggtctaacaccttcaaagggaccagcacaagctagcgtcaatggagtcacattaattggagaatcagtaaaaacacagtttaactactttaagaaagtagacggcattattcaacagttgcctgaaacctactttactcagagcagagacttagaggattttaagcccagatcacaaatggaaactgactttctcgagctcgctatggatgaattcatacagcgatataagctcgagggctatgccttcgaacacatcgtttatggagatttcagtcatggacaacttggcggtcttcatttaatgataggcttagccaagcgctcacaagattcaccacttaaattagaggattttatccctatggacagcacagtgaaaaattacttcataacagatgcgcaaacaggttcatcaaaatgtgtgtgttctgtgattgatcttttacttgatgactttgtcgagataataaagtcacaagatttgtcagtgatttcaaaagtggtcaaggttacaattgactatgctgaaatttcattcatgctttggtgtaaggatggacatgttgaaaccttctacccaaaactacaagcaagtcaagcgtggcaaccaggtgttgcgatgcctaacttgtacaagatgcaaagaatgcttcttgaaaagtgtgaccttcagaattatggtgaaaatgctgttataccaaaaggaataatgatgaatgtcgcaaagtatactcaactgtgtcaatacttaaatacacttactttagctgtaccctacaacatgagagttattcactttggtgctggctctgataaaggagttgcaccaggtacagctgtgctcagacaatggttgccaactggcacactacttgtcgattcagatcttaatgacttcgtctccgacgcagattctactttaattggagactgtgcaacagtacatacggctaataaatgggaccttattattagcgatatgtatgaccctaggaccaaacatgtgacaaaagagaatgactctaaagaagggtttttcacttatctgtgtggatttataaagcaaaaactagccctgggtggttctatagctgtaaagataacagagcattcttggaatgctgacctttacaagcttatgggccatttctcatggtggacagcttttgttacaaatgtaaatgcatcatcatcggaagcatttttaattggggctaactatcttggcaagccgaaggaacaaattgatggctataccatgcatgctaactacattttctggaggaacacaaatcctatccagttgtcttcctattcactctttgacatgagcaaatttcctcttaaattaagaggaactgctgtaatgtctcttaaggagaatcaaatcaatgatatgatttattctcttctggaaaaaggtaggcttatcattagagaaaacaacagagttgtggtttcaagtgatattcttgttaacaactaaacgaacatgtttattttcttattatttcttactctcactagtggtagtgaccttgaccggtgcaccacttttgatgatgttcaagctcctaattacactcaacatacttcatctatgaggggggtttactatcctgatgaaatttttagatcagacactctttatttaactcaggatttatttcttccattttattctaatgttacagggtttcatactattaatcatacgtttggcaaccctgtcataccttttaaggatggtatttattttgctgccacagagaaatcaaatgttgtccgtggttgggtttttggttctaccatgaacaacaagtcacagtcggtgattattattaacaattctactaatgttgttatacgagcatgtaactttgaattgtgtgacaaccctttctttgctgtttctaaacccatgggtacacagacacatactatgatattcgataatgcatttaattgcactttcgagtacatatctgatgccttttcgcttgatgtttcagaaaagtcaggtaattttaaacacttacgagagtttgtgtttaaaaataaagatgggtttctctatgtttataagggctatcaacctatagatgtagttcgtgatctaccttctggttttaacactttgaaacctatttttaagttgcctcttggtattaacattacaaattttagagccattcttacagccttttcacctgctcaagacatttggggcacgtcagctgcagcctattttgttggctatttaaagccaactacatttatgctcaagtatgatgaaaatggtacaatcacagatgctgttgattgttctcaaaatccacttgctgaactcaaatgctctgttaagagctttgagattgacaaaggaatttaccagacctctaatttcagggttgttccctcaggagatgttgtgagattccctaatattacaaacttgtgtccttttggagaggtttttaatgctactaaattcccttctgtctatgcatgggagagaaaaaaaatttctaattgtgttgctgattactctgtgctctacaactcaacatttttttcaacctttaagtgctatggcgtttctgccactaagttgaatgatctttgcttctccaatgtctatgcagattcttttgtagtcaagggagatgatgtaagacaaatagcgccaggacaaactggtgttattgctgattataattataaattgccagatgatttcatgggttgtgtccttgcttggaatactaggaacattgatgctacttcaactggtaattataattataaatataggtatcttagacatggcaagcttaggccctttgagagagacatatctaatgtgcctttctcccctgatggcaaaccttgcaccccacctgctcttaattgttattggccattaaatgattatggtttttacaccactactggcattggctaccaaccttacagagttgtagtactttcttttgaacttttaaatgcaccggccacggtttgtggaccaaaattatccactgaccttattaagaaccagtgtgtcaattttaattttaatggactcactggtactggtgtgttaactccttcttcaaagagatttcaaccatttcaacaatttggccgtgatgtttctgatttcactgattccgttcgagatcctaaaacatctgaaatattagacatttcaccttgctcttttgggggtgtaagtgtaattacacctggaacaaatgcttcatctgaagttgctgttctatatcaagatgttaactgcactgatgtttctacagcaattcatgcagatcaactcacaccagcttggcgcatatattctactggaaacaatgtattccagactcaagcaggctgtcttataggagctgagcatgtcgacacttcttatgagtgcgacattcctattggagctggcatttgtgctagttaccatacagtttctttattacgtagtactagccaaaaatctattgtggcttatactatgtctttaggtgctgatagttcaattgcttactctaataacaccattgctatacctactaacttttcaattagcattactacagaagtaatgcctgtttctatggctaaaacctccgtagattgtaatatgtacatctgcggagattctactgaatgtgctaatttgcttctccaatatggtagcttttgcacacaactaaatcgtgcactctcaggtattgctgctgaacaggatcgcaacacacgtgaagtgttcgctcaagtcaaacaaatgtacaaaaccccaactttgaaatattttggtggttttaatttttcacaaatattacctgaccctctaaagccaactaagaggtcttttattgaggacttgctctttaataaggtgacactcgctgatgctggcttcatgaagcaatatggcgaatgcctaggtgatattaatgctagagatctcatttgtgcgcagaagttcaatggacttacagtgttgccacctctgctcactgatgatatgattgctgcctacactgctgctctagttagtggtactgccactgctggatggacatttggtgctggcgctgctcttcaaataccttttgctatgcaaatggcatataggttcaatggcattggagttacccaaaatgttctctatgagaaccaaaaacaaatcgccaaccaatttaacaaggcgattagtcaaattcaagaatcacttacaacaacatcaactgcattgggcaagctgcaagacgttgttaaccagaatgctcaagcattaaacacacttgttaaacaacttagctctaattttggtgcaatttcaagtgtgctaaatgatatcctttcgcgacttgataaagtcgaggcggaggtacaaattgacaggttaattacaggcagacttcaaagccttcaaacctatgtaacacaacaactaatcagggctgctgaaatcagggcttctgctaatcttgctgctactaaaatgtctgagtgtgttcttggacaatcaaaaagagttgacttttgtggaaagggctaccaccttatgtccttcccacaagcagccccgcatggtgttgtcttcctacatgtcacgtatgtgccatcccaggagaggaacttcaccacagcgccagcaatttgtcatgaaggcaaagcatacttccctcgtgaaggtgtttttgtgtttaatggcacttcttggtttattacacagaggaacttcttttctccacaaataattactacagacaatacatttgtctcaggaaattgtgatgtcgttattggcatcattaacaacacagtttatgatcctctgcaacctgagcttgactcattcaaagaagagctggacaagtacttcaaaaatcatacatcaccagatgttgatcttggcgacatttcaggcattaacgcttctgtcgtcaacattcaaaaagaaattgaccgcctcaatgaggtcgctaaaaatttaaatgaatcactcattgaccttcaagaattgggaaaatatgagcaatatattaaatggccttggtatgtttggctcggcttcattgctggactaattgccatcgtcatggttacaatcttgctttgttgcatgactagttgttgcagttgcctcaagggtgcatgctcttgtggttcttgctgcaagtttgatgaggatgactctgagccagttctcaagggtgtcaaattacattacacataaacgaacttatggatttgtttatgagattttttactcttggatcaattactgcacagccagtaaaaattgacaatgcttctcctgcaagtactgttcatgctacagcaacgataccgctacaagcctcactccctttcggatggcttgttattggcgttgcatttcttgctgtttttcagagcgctaccaaaataattgcgctcaataaaagatggcagctagccctttataagggcttccagttcatttgcaatttactgctgctatttgttaccatctattcacatcttttgcttgtcgctgcaggtatggaggcgcaatttttgtacctctatgccttgatatattttctacaatgcatcaacgcatgtagaattattatgagatgttggctttgttggaagtgcaaatccaagaacccattactttatgatgccaactactttgtttgctggcacacacataactatgactactgtataccatataacagtgtcacagatacaattgtcgttactgaaggtgacggcatttcaacaccaaaactcaaagaagactaccaaattggtggttattctgaggataggcactcaggtgttaaagactatgtcgttgtacatggctatttcaccgaagtttactaccagcttgagtctacacaaattactacagacactggtattgaaaatgctacattcttcatctttaacaagcttgttaaagacccaccgaatgtgcaaatacacacaatcgacggctcttcaggagttgctaatccagcaatggatccaatttatgatgagccgacgacgactactagcgtgcctttgtaagcacaagaaagtgagtacgaacttatgtactcattcgtttcggaagaaacaggtacgttaatagttaatagcgtacttctttttcttgctttcgtggtattcttgctagttacactagccatccttactgcgcttcgattgtgtgcgtactgctgcaatattgttaacgtgagtttagtaaaaccaacggtttacgtctactcgcgtgttaaaaatctgaactcttctgaaggagttcctgatcttctggtctaaacgaactaactattattattattctgtttggaactttaacattgcttatcatggcagacaacggtactattaccgttgaggagcttaaacaactcctggaacaatggaacctagtaataggtttcctatgcctagcctggattatgttactacaatttgcctattctaatcggaacaggtttttgtacataataaagcttgttttcctctggctcttgtggccagtaacacttgcttgttttgtgcttgctgctgtctacagaattaattgggtgactggcgggattgcgattgcaatggcttgtattgtaggcttgatgtggcttagctacttcgttgcttccttcaggctgtttgctcgtacccgctcaatgtggtcattcaacccagaaacaaacattcttctcaatgtgcctctccgggggacaattgtgaccagaccgctcatggaaagtgaacttgtcattggtgctgtgatcattcgtggtcacttgcgaatggccggacactccctagggcgctgtgacattaaggacctgccaaaagagatcactgtggctacatcacgaacgctttcttattacaaattaggagcgtcgcagcgtgtaggcactgattcaggttttgctgcatacaaccgctaccgtattggaaactataaattaaatacagaccacgccggtagcaacgacaatattgctttgctagtacagtaagtgacaacagatgtttcatcttgttgacttccaggttacaatagcagagatattgattatcattatgaggactttcaggattgctatttggaatcttgacgttataataagttcaatagtgagacaattatttaagcctctaactaagaagaattattcggagttagatgatgaagaacctatggagttagattatccataaaacgaacatgaaaattattctcttcctgacattgattgtatttacatcttgcgagctatatcactatcaggagtgtgttagaggtacgactgtactactaaaagaaccttgcccatcaggaacatacgagggcaattcaccatttcaccctcttgctgacaataaatttgcactaacttgcactagcacacactttgcttttgcttgtgctgacggtactcgacatacctatcagctgcgtgcaagatcagtttcaccaaaacttttcatcagacaagaggaggttcaacaagagctctactcgccactttttctcattgttgctgctctagtatttttaatactttgcttcaccattaagagaaagacagaatgaatgagctcactttaattgacttctatttgtgctttttagcctttctgctattccttgttttaataatgcttattatattttggttttcactcgaaatccaggatctagaagaaccttgtaccaaagtctaaacgaacatgaaacttctcattgttttgacttgtatttctttatgcagttgcatatgcactgtagtacagcgctgtgcatctaataaacctcatgtgcttgaagatccttgtaaggtacaacactaggggtaatacttatagcactgcttggctttgtgctctaggaaaggttttaccttttcatagatggcacactatggttcaaacatgcacacctaatgttactatcaactgtcaagatccagctggtggtgcgcttatagctaggtgttggtaccttcatgaaggtcaccaaactgctgcatttagagacgtacttgttgttttaaataaacgaacaaattaaaatgtctgataatggaccccaatcaaaccaacgtagtgccccccgcattacatttggtggacccacagattcaactgacaataaccagaatggaggacgcaatggggcaaggccaaaacagcgccgaccccaaggtttacccaataatactgcgtcttggttcacagctctcactcagcatggcaaggaggaacttagattccctcgaggccagggcgttccaatcaacaccaatagtggtccagatgaccaaattggctactaccgaagagctacccgacgagttcgtggtggtgacggcaaaatgaaagagctcagccccagatggtacttctattacctaggaactggcccagaagcttcacttccctacggcgctaacaaagaaggcatcgtatgggttgcaactgagggagccttgaatacacccaaagaccacattggcacccgcaatcctaataacaatgctgccaccgtgctacaacttcctcaaggaacaacattgccaaaaggcttctacgcagagggaagcagaggcggcagtcaagcctcttctcgctcctcatcacgtagtcgcggtaattcaagaaattcaactcctggcagcagtaggggaaattctcctgctcgaatggctagcggaggtggtgaaactgccctcgcgctattgctgctagacagattgaaccagcttgagagcaaagtttctggtaaaggccaacaacaacaaggccaaactgtcactaagaaatctgctgctgaggcatctaaaaagcctcgccaaaaacgtactgccacaaaacagtacaacgtcactcaagcatttgggagacgtggtccagaacaaacccaaggaaatttcggggaccaagacctaatcagacaaggaactgattacaaacattggccgcaaattgcacaatttgctccaagtgcctctgcattctttggaatgtcacgcattggcatggaagtcacaccttcgggaacatggctgacttatcatggagccattaaattggatgacaaagatccacaattcaaagacaacgtcatactgctgaacaagcacattgacgcatacaaaacattcccaccaacagagcctaaaaaggacaaaaagaaaaagactgatgaagctcagcctttgccgcagagacaaaagaagcagcccactgtgactcttcttcctgcggctgacatggatgatttctccagacaacttcaaaattccatgagtggagcttctgctgattcaactcaggcataaacactcatgatgaccacacaaggcagatgggctatgtaaacgttttcgcaattccgtttacgatacatagtctactcttgtgcagaatgaattctcgtaactaaacagcacaagtaggtttagttaactttaatctcacatagcaatctttaatcaatgtgtaacattagggaggacttgaaagagccaccacattttcatcgaggccacgcggagtacgatcgagggtacagtgaataatgctagggagagct

SEQ ID NO: 72 - DNA, 29573 bp, Coronavirus
aactttaaaatctgtgtagctgtcgctcggctgcatgcctagtgcacctacgcagtataaacaataataaattttactgtcgttgacaagaaacgagtaactcgtccctcttctgcagactgcttacggtttcgtccgtgttgcagtcgatcatcagcatacctaggtttcgtccgggtgtgaccgaaaggtaagatggagagccttgttcttggtgtcaacgagaaaacacacgtccaactcagtttgcctgtccttcaggttagagacgtgctagtgcgtggcttcggggactctgtggaagaggccctatcggaggcacgtgaacacctcaaaaatggcacttgtggtctagtagagctggaaaaaggcgtactgccccagcttgaacagccctatgtgttcattaaacgttctgatgccttaagcaccaatcacggccacaaggtcgttgagctggttgcagaaatggacggcattcagtacggtcgtagcggtataacactgggagtactcgtgccacatgtgggcgaaaccccaattgcataccgcaatgttcttcttcgtaagaacggtaataagggagccggtggtcatagctatggcatcgatctaaagtcttatgacttaggtgacgagcttggcactgatcccattgaagattatgaacaaaactggaacactaagcatggcagtggtgcactccgtgaactcactcgtgagctcaatggaggtgcagtcactcgctatgtcgacaacaatttctgtggcccagatgggtaccctcttgattgcatcaaagattttctcgcacgcgcgggcaagtcaatgtgcactctttccgaacaacttgattacatcgagtcgaagagaggtgtctactgctgccgtgaccatgagcatgaaattgcctggttcactgagcgctctgataagagctacgagcaccagacacccttcgaaattaagagtgccaagaaatttgacactttcaaaggggaatgcccaaagtttgtgtttcctcttaactcaaaagtcaaagtcattcaaccacgtgttgaaaagaaaaagactgagggtttcatggggcgtatacgctctgtgtaccctgttgcatctccacaggagtgtaacaatatgcacttgtctaccttgatgaaatgtaatcattgcgatgaagtttcatggcagacgtgcgactttctgaaagccacttgtgaacattgtggcactgaaaatttagttattgaaggacctactacatgtgggtacctacctactaatgctgtagtgaaaatgccatgtcctgcctgtcaagacccagagattggacctgagcatagtgttgcagattatcacaaccactcaaacattgaaactcgactccgcaagggaggtaggactagatgttttggaggctgtgtgtttgcctatgttggctgctataataagcgtgcctactgggttcctcgtgctagtgctgatattggctcaggccatactggcattactggtgacaatgtggagaccttgaatgaggatctccttgagatactgagtcgtgaacgtgttaacattaacattgttggcgattttcatttgaatgaagaggttgccatcattttggcatctttctctgcttctacaagtgcctttattgacactataaagagtcttgattacaagtctttcaaaaccattgttgagtcctgcggtaactataaagttaccaagggaaagcccgtaaaaggtgcttggaacattggacaacagagatcagttttaacaccactgtgtggttttccctcacaggctgctggtgttatcagatcaatttttgcgcgcacacttgatgcagcaaaccactcaattcctgatttgcaaagagcagctgtcaccatacttgatggtatttctgaacagtcattacgtcttgtcgacgccatggtttatacttcagacctgctcaccaacagtgtcattattatggcatatgtaactggtggtcttgtacaacagacttctcagtggttgtctaatcttttgggcactactgttgaaaaactcaggcctatctttgaatggattgaggcgaaacttagtgcaggagttgaatttctcaaggatgcttgggagattctcaaatttctcattacaggtgtttttgacatcgtcaagggtcaaatacaggttgcttcagataacatcaaggattgtgtaaaatgcttcattgatgttgttaacaaggcactcgaaatgtgcattgatcaagtcactatcgctggcgcaaagttgcgatcactcaacttaggtgaagtcttcatcgctcaaagcaagggactttaccgtcagtgtatacgtggcaaggagcagctgcaactactcatgcctcttaaggcaccaaaagaagtaacctttcttgaaggtgattcacatgacacagtacttacctctgaggaggttgttctcaagaacggtgaactcgaagcactcgagacgcccgttgatagcttcacaaatggagctatcgttggcacaccagtctgtgtaaatggcctcatgctcttagagattaaggacaaagaacaatactgcgcattgtctcctggtttactggctacaaacaatgtctttcgcttaaaagggggtgcaccaattaaaggtgtaacctttggagaagatactgtttgggaagttcaaggttacaagaatgtgagaatcacatttgagcttgatgaacgtgttgacaaagtgcttaatgaaaagtgctctgtctacactgttgaatccggtaccgaagttactgagtttgcatgtgttgtagcagaggctgttgtgaagactttacaaccagtttctgatctccttaccaacatgggtattgatcttgatgagtggagtgtagctacattctacttatttgatgatgctggtgaagaaaacttttcatcacgtatgtattgttccttttaccctccagatgaggaagaagaggacgatgcagagtgtgaggaagaagaaattgatgaaacctgtgaacatgagtacggtacagaggatgattatcaaggtctccctctggaatttggtgcctcagctgaaacagttcgagttgaggaagaagaagaggaagactggctggatgatactactgagcaatcagagattgagccagaaccagaacctacacctgaagaaccagttaatcagtttactggttatttaaaacttactgacaatgttgccattaaatgtgttgacatcgttaaggaggcacaaagtgctaatcctatggtgattgtaaatgctgctaacatacacctgaaacatggtggtggtgtagcaggtgcactcaacaaggcaaccaatggtgccatgcaaaaggagagtgatgattacattaagctaaatggccctcttacagtaggagggtcttgtttgctttctggacataatcttgctaagaagtgtctgcatgttgttggacctaacctaaatgcaggtgaggacatccagcttcttaaggcagcatatgaaaatttcaattcacaggacatcttacttgcaccattgttgtcagcaggcatatttggtgctaaaccacttcagtctttacaagtgtgcgtgcagacggttcgtacacaggtttatattgcagtcaatgacaaagctctttatgagcaggttgtcatggattatcttgataacctgaagcctagagtggaagcacctaaacaagaggagccaccaaacacagaagattccaaaactgaggagaaatccgtcgtacagaagcctgtcgatgtgaagccaaaaattaaggcctgcattgatgaggttaccacaacactggaagaaactaagtttcttaccaataagttactcttgtttgctgatatcaatggtaagctttaccatgattctcagaacatgcttagaggtgaagatatgtctttccttgagaaggatgcaccttacatggtaggtgatgttatcactagtggtgatatcacttgtgttgtaataccctccaaaaaggctggtggcactactgagatgctctcaagagctttgaagaaagtgccagttgatgagtatataaccacgtaccctggacaaggatgtgctggttatacacttgaggaagctaagactgctcttaagaaatgcaaatctgcattttatgtactaccttcagaagcacctaatgctaaggaagagattctaggaactgtatcctggaatttgagagaaatgcttgctcatgctgaagagacaagaaaattaatgcctatatgcatggatgttagagccataatggcaaccatccaacgtaagtataaaggaattaaaattcaagagggcatcgttgactatggtgtccgattcttcttttatactagtaaagagcctgtagcttctattattacgaagctgaactctctaaatgagccgcttgtcacaatgccaattggttatgtgacacatggttttaatcttgaagaggctgcgcgctgtatgcgttctcttaaagctcctgccgtagtgtcagtatcatcaccagatgctgttactacatataatggatacctcacttcgtcatcaaagacatctgaggagcactttgtagaaacagtttctttggctggctcttacagagattggtcctattcaggacagcgtacagagttaggtgttgaatttcttaagcgtggtgacaaaattgtgtaccacactctggagagccccgtcgagtttcatcttgacggtgaggttctttcacttgacaaactaaagagtctcttatccctgcgggaggttaagactataaaagtgttcacaactgtggacaacactaatctccacacacagcttgtggatatgtctatgacatatggacagcagtttggtccaacatacttggatggtgctgatgttacaaaaattaaacctcatgtaaatcatgagggtaagactttctttgtactacctagtgatgacacactacgtagtgaagctttcgagtactaccatactcttgatgagagttttcttggtaggtacatgtctgctttaaaccacacaaagaaatggaaatttcctcaagttggtggtttaacttcaattaaatgggctgataacaattgttatttgtctagtgttttattagcacttcaacagcttgaagtcaaattcaatgcaccagcacttcaagaggcttattatagagcccgtgctggtgatgctgctaacttttgtgcactcatactcgcttacagtaataaaactgttggcgagcttggtgatgtcagagaaactatgacccatcttctacagcatgctaatttggaatctgcaaagcgagttcttaatgtggtgtgtaaacattgtggtcagaaaactactaccttaacgggtgtagaagctgtgatgtatatgggtactctatcttatgataatcttaagacaggtgtttccattccatgtgtgtgtggtcgtgatgctacacaatatctagtacaacaagagtcttcttttgttatgatgtctgcaccacctgctgagtataaattacagcaaggtacattcttatgtgcgaatgagtacactggtaactatcagtgtggtcattacactcatataactgctaaggagaccctctatcgtattgacggagctcaccttacaaagatgtcagagtacaaaggaccagtgactgatgttttctacaaggaaacatcttacactacaaccatcaagcctgtgtcgtataaactcgatggagttacttacacagagattgaaccaaaattggatgggtattataaaaaggataatgcttactatacagagcagcctatagaccttgtaccaactcaaccattaccaaatgcgagttttgataatttcaaactcacatgttctaacacaaaatttgctgatgatttaaatcaaatgacaggcttcacaaagccagcttcacgagagctatctgtcacattcttcccagacttgaatggcgatgtagtggctattgactatagacactattcagcgagtttcaagaaaggtgctaaattactgcataagccaattgtttggcacattaaccaggctacaaccaagacaacgttcaaaccaaacacttggtgtttacgttgtctttggagtacaaagccagtagatacttcaaattcatttgaagttctggcagtagaagacacacaaggaatggacaatcttgcttgtgaaagtcaacaacccacctctgaagaagtagtggaaaatcctaccatacagaaggaagtcatagagtgtgacgtgaaaactaccgaagttgtaggcaatgtcatacttaaaccatcagatgaaggtgttaaagtaacacaagagttaggtcatgaggatcttatggctgcttatgtggaaaacacaagcattaccattaagaaacctaatgagctttcactagccttaggtttaaaaacaattgccactcatggtattgctgcaattaatagtgttccttggagtaaaattttggcttatgtcaaaccattcttaggacaagcagcaattacaacatcaaattgcgctaagagattagcacaacgtgtgtttaacaattatatgccttatgtgtttacattattgttccaattgtgtacttttactaaaagtaccaattctagaattagagcttcactacctacaactattgctaaaaatagtgttaagagtgttgctaaattatgtttggatgccggcattaattatgtgaagtcacccaaattttctaaattgttcacaatcgctatgtggctattgttgttaagtatttgcttaggttctctaatctgtgtaactgctgcttttggtgtactcttatctaattttggtgctccttcttattgtaatggcgttagagaattgtatcttaattcgtctaacgttactactatggatttctgtgaaggttcttttccttgcagcatttgtttaagtggattagactcccttgattcttatccagctcttgaaaccattcaggtgacgatttcatcgtacaagctagacttgacaattttaggtctggccgctgagtgggttttggcatatatgttgttcacaaaattcttttatttattaggtctttcagctataatgcaggtgttctttggctattttgctagtcatttcatcagcaattcttggctcatgtggtttatcattagtattgtacaaatggcacccgtttctgcaatggttaggatgtacatcttctttgcttctttctactacatatggaagagctatgttcatatcatggatggttgcacctcttcgacttgcatgatgtgctataagcgcaatcgtgccacacgcgttgagtgtacaactattgttaatggcatgaagagatctttctatgtctatgcaaatggaggccgtggcttctgcaagactcacaattggaattgtctcaattgtgacacattttgcactggtagtacattcattagtgatgaagttgctcgtgatttgtcactccagtttaaaagaccaatcaaccctactgaccagtcatcgtatattgttgatagtgttgctgtgaaaaatggcgcgcttcacctctactttgacaaggctggtcaaaagacctatgagagacatccgctctcccattttgtcaatttagacaatttgagagctaacaacactaaaggttcactgcctattaatgtcatagtttttgatggcaagtccaaatgcgacgagtctgcttctaagtctgcttctgtgtactacagtcagctgatgtgccaacctattctgttgcttgaccaagctcttgtatcagacgttggagatagtactgaagtttccgttaagatgtttgatgcttatgtcgacaccttttcagcaacttttagtgttcctatggaaaaacttaaggcacttgttgctacagctcacagcgagttagcaaagggtgtagctttagatggtgtcctttctacattcgtgtcagctgcccgacaaggtgttgttgataccgatgttgacacaaaggatgttattgaatgtctcaaactttcacatcactctgacttagaagtgacaggtgacagttgtaacaatttcatgctcacctataataaggttgaaaacatgacgcccagagatcttggcgcatgtattgactgtaatgcaaggcatatcaatgcccaagtagcaaaaagtcacaatgtttcactcatctggaatgtaaaagactacatgtctttatctgaacagctgcgtaaacaaattcgtagtgctgccaagaagaacaacataccttttagactaacttgtgctacaactagacaggttgtcaatgtcataactactaaaatctcactcaagggtggtaagattgttagtacttgttttaaacttatgcttaaggccacattattgtgcgttcttgctgcattggtttgttatatcgttatgccagtacatacattgtcaatccatgatggttacacaaatgaaatcattggttacaaagccattcaggatggtgtcactcgtgacatcatttctactgatgattgttttgcaaataaacatgctggttttgacgcatggtttagccagcgtggtggttcatacaaaaatgacaaaagctgccctgtagtagctgctatcattacaagagagattggtttcatagtgcctggcttaccgggtactgtgctgagagcaatcaatggtgacttcttgcattttctacctcgtgtttttagtgctgttggcaacatttgctacacaccttccaaactcattgagtatagtgattttgctacctctgcttgcgttcttgctgctgagtgtacaatttttaaggatgctatgggcaaacctgtgccatattgttatgacactaatttgctagagggttctatttcttatagtgagcttcgtccagacactcgttatgtgcttatggatggttccatcatacagtttcctaacacttacctggagggttctgttagagtagtaacaacttttgatgctgagtactgtagacatggtacatgcgaaaggtcagaagtaggtatttgcctatctaccagtggtagatgggttcttaataatgagcattacagagctctatcaggagttttctgtggtgttgatgcgatgaatctcatagctaacatctttactcctcttgtgcaacctgtgggtgctttagatgtgtctgcttcagtagtggctggtggtattattgccatattggtgacttgtgctgcctactactttatgaaattcagacgtgtttttggtgagtacaaccatgttgttgctgctaatgcacttttgtttttgatgtctttcactatactctgtctggtaccagcttacagctttctgccgggagtctactcagtcttttacttgtacttgacattctatttcaccaatgatgtttcattcttggctcaccttcaatggtttgccatgttttctcctattgtgcctttttggataacagcaatctatgtattctgtatttctctgaagcactgccattggttctttaacaactatcttaggaaaagagtcatgtttaatggagttacatttagtaccttcgaggaggctgctttgtgtacctttttgctcaacaaggaaatgtacctaaaattgcgtagcgagacactgttgccacttacacagtataacaggtatcttgctctatataacaagtacaagtatttcagtggagccttagatactaccagctatcgtgaagcagcttgctgccacttagcaaaggctctaaatgactttagcaactcaggtgctgatgttctctaccaaccaccacagacatcaatcacttctgctgttctgcagagtggttttaggaaaatggcattcccgtcaggcaaagttgaagggtgcatggtacaagtaacctgtggaactacaactcttaatggattgtggttggatgacacagtatactgtccaagacatgtcatttgcacagcagaagacatgcttaatcctaactatgaagatctgctcattcgcaaatccaaccatagctttcttgttcaggctggcaatgttcaacttcgtgttattggccattctatgcaaaattgtctgcttaggcttaaagttgatacttctaaccctaagacacccaagtataaatttgtccgtatccaacctggtcaaacattttcagttctagcatgctacaatggttcaccatctggtgtttatcagtgtgccatgagacctaatcataccattaaaggttctttccttaatggatcatgtggtagtgttggttttaacattgattatgattgcgtgtctttctgctatatgcatcatatggagcttccaacaggagtacacgctggtactgacttagaaggtaaattctatggtccatttgttgacagacaaactgcacaggctgcaggtacagacacaaccataacattaaatgttttggcatggctgtatgctgctgttatcaatggtgataggtggtttcttaatagattcaccactactttgaatgactttaaccttgtggcaatgaagtacaactatgaacctttgacacaagatcatgttgacatattgggacctctttctgctcaaacaggaattgccgtcttagatatgtgtgctgctttgaaagagctgctgcagaatggtatgaatggtcgtactatccttggtagcactattttagaagatgagtttacaccatttgatgttgttagacaatgctctggtgttaccttccaaggtaagttcaagaaaattgttaagggcactcatcattggatgcttttaactttcttgacatcactattgattcttgttcaaagtacacagtggtcactgtttttctttgtttacgagaatgctttcttgccatttactcttggtattatggcaattgctgcatgtgctatgctgcttgttaagcataagcacgcattcttgtgcttgtttctgttaccttctcttgcaacagttgcttactttaatatggtctacatgcctgctagctgggtgatgcgtatcatgacatggcttgaattggctgacactagcttgtctggttataggcttaaggattgtgttatgtatgcttcagctttagttttgcttattctcatgacagctcgcactgtttatgatgatgctgctagacgtgtttggacactgatgaatgtcattacacttgtttacaaagtctactatggtaatgctttagatcaagctatttccatgtgggccttagttatttctgtaacctctaactattctggtgtcgttacgactatcatgtttttagctagagctatagtgtttgtgtgtgttgagtattatccattgttatttattactggcaacaccttacagtgtatcatgcttgtttattgtttcttaggctattgttgctgctgctactttggccttttctgtttactcaaccgttacttcaggcttactcttggtgtttatgactacttggtctctacacaagaatttaggtatatgaactcccaggggcttttgcctcctaagagtagtattgatgctttcaagcttaacattaagttgttgggtattggaggtaaaccatgtatcaaggttgctactgtacagtctaaaatgtctgacgtaaagtgcacatctgtggtactgctctcggttcttcaacaacttagagtagagtcatcttctaaattgtgggcacaatgtgtacaactccacaatgatattcttcttgcaaaagacacaactgaagctttcgagaagatggtttctcttttgtctgttttgctatccatgcagggtgctgtagacattaataggttgtgcgaggaaatgctcgataaccgtgctactcttcaggctattgcttcagaatttagttctttaccatcatatgccgcttatgccactgcccaggaggcctatgagcaggctgtagctaatggtgattctgaagtcgttctcaaaaagttaaagaaatctttgaatgtggctaaatctgagtttgaccgtgatgctgccatgcaacgcaagttggaaaagatggcagatcaggctatgacccaaatgtacaaacaggcaagatctgaggacaagagggcaaaagtaactagtgctatgcaaacaatgctcttcactatgcttaggaagcttgataatgatgcacttaacaacattatcaacaatgcgcgtgatggttgtgttccactcaacatcataccattgactacagcagccaaactcatggttgttgtccctgattatggtacctacaagaacacttgtgatggtaacacctttacatatgcatctgcactctgggaaatccagcaagttgttgatgcggatagcaagattgttcaacttagtgaaattaacatggacaattcaccaaatttggcttggcctcttattgttacagctctaagagccaactcagctgttaaactacagaataatgaactgagtccagtagcactacgacagatgtcctgtgcggctggtaccacacaaacagcttgtactgatgacaatgcacttgcctactataacaattcgaagggaggtaggtttgtgctggcattactatcagaccaccaagatctcaaatgggctagattccctaagagtgatggtacaggtacaatttacacagaactggaaccaccttgtaggtttgttacagacacaccaaaagggcctaaagtgaaatacttgtacttcatcaaaggcttaaacaacctaaatagaggtatggtgctgggcagtttagctgctacagtacgtcttcaggctggaaatgctacagaagtacctgccaattcaactgtgctttccttctgtgcttttgcagtagaccctgctaaagcatataaggattacctagcaagtggaggacaaccaatcaccaactgtgtgaagatgttgtgtacacacactggtacaggacaggcaattactgtaacaccagaagctaacatggaccaagagtcctttggtggtgcttcatgttgtctgtattgtagatgccacattgaccatccaaatcctaaaggattctgtgacttgaaaggtaagtacgtccaaatacctaccacttgtgctaatgacccagtgggttttacacttagaaacacagtctgtaccgtctgcggaatgtggaaaggttatggctgtagttgtgaccaactccgcgaacccttgatgcagtctgcggatgcatcaacgtttttaaacgggtttgcggtgtaagtgcagcccgtcttacaccgtgcggcacaggcactagtactgatgtcgtctacagggcttttgatatttacaacgaaaaagttgctggttttgcaaagttcctaaaaactaattgctgtcgcttccaggagaaggatgaggaaggcaatttattagactcttactttgtagttaagaggcatactatgtctaactaccaacatgaagagactatttataacttggttaaagattgtccagcggttgctgtccatgactttttcaagtttagagtagatggtgacatggtaccacatatatcacgtcagcgtctaactaaatacacaatggctgatttagtctatgctctacgtcattttgatgagggtaattgtgatacattaaaagaaatactcgtcacatacaattgctgtgatgatgattatttcaataagaaggattggtatgacttcgtagagaatcctgacatcttacgcgtatatgctaacttaggtgagcgtgtacgccaatcattattaaagactgtacaattctgcgatgctatgcgtgatgcaggcattgtaggcgtactgacattagataatcaggatcttaatgggaactggtacgatttcggtgatttcgtacaagtagcaccaggctgcggagttcctattgtggattcatattactcattgctgatgcccatcctcactttgactagggcattggctgctgagtcccatatggatgctgatctcgcaaaaccacttattaagtgggatttgctgaaatatgattttacggaagagagactttgtctcttcgaccgttattttaaatattgggaccagacataccatcccaattgtattaactgtttggatgataggtgtatccttcattgtgcaaactttaatgtgttattttctactgtgtttccacctacaagttttggaccactagtaagaaaaatatttgtagatggtgttccttttgttgtttcaactggataccattttcgtgagttaggagtcgtacataatcaggatgtaaacttacatagctcgcgtctcagtttcaaggaacttttagtgtatgctgctgatccagctatgcatgcagcttctggcaatttattgctagataaacgcactacatgcttttcagtagctgcactaacaaacaatgttgcttttcaaactgtcaaacccggtaattttaataaagacttttatgactttgctgtgtctaaaggtttctttaaggaaggaagttctgttgaactaaaacacttcttctttgctcaggatggcaacgctgctatcagtgattatgactattatcgttataatctgccaacaatgtgtgatatcagacaactcctattcgtagttgaagttgttgataaatactttgattgttacgatggtggctgtattaatgccaaccaagtaatcgttaacaatctggataaatcagctggtttcccatttaataaatggggtaaggctagactttattatgactcaatgagttatgaggatcaagatgcacttttcgcgtatactaagcgtaatgtcatccctactataactcaaatgaatcttaagtatgccattagtgcaaagaatagagctcgcaccgtagctggtgtctctatctgtagtactatgacaaatagacagtttcatcagaaattattgaagtcaatagccgccactagaggagctactgtggtaattggaacaagcaagttttacggtggctggcataatatgttaaaaactgtttacagtgatgtagaaactccacaccttatgggttgggattatccaaaatgtgacagagccatgcctaacatgcttaggataatggcctctcttgttcttgctcgcaaacataacacttgctgtaacttatcacaccgtttctacaggttagctaacgagtgtgcgcaagtattaagtgagatggtcatgtgtggcggctcactatatgttaaaccaggtggaacatcatccggtgatgctacaactgcttatgctaatagtgtctttaacatttgtcaagctgttacagccaatgtaaatgcacttctttcaactgatggtaataagatagctgacaagtatgtccgcaatctacaacacaggctctatgagtgtctctatagaaatagggatgttgatcatgaattcgtggatgagttttacgcttacctgcgtaaacatttctccatgatgattctttctgatgatgccgttgtgtgctataacagtaactatgcggctcaaggtttagtagctagcattaagaactttaaggcagttctttattatcaaaataatgtgttcatgtctgaggcaaaatgttggactgagactgaccttactaaaggacctcacgaattttgctcacagcatacaatgctagttaaacaaggagatgattacgtgtacctgccttacccagatccatcaagaatattaggcgcaggctgttttgtcgatgatattgtcaaaacagatggtacacttatgattgaaaggttcgtgtcactggctattgatgcttacccacttacaaaacatcctaatcaggagtatgctgatgtctttcacttgtatttacaatacattagaaagttacatgatgagcttactggccacatgttggacatgtattccgtaatgctaactaatgataacacctcacggtactgggaacctgagttttatgaggctatgtacacaccacatacagtcttgcaggctgtaggtgcttgtgtattgtgcaattcacagacttcacttcgttgcggtgcctgtattaggagaccattcctatgttgcaagtgctgctatgaccatgtcatttcaacatcacacaaattagtgttgtctgttaatccctatgtttgcaatgccccaggttgtgatgtcactgatgtgacacaactgtatctaggaggtatgagctattattgcaagtcacataagcctcccattagttttccattatgtgctaatggtcaggtttttggtttatacaaaaacacatgtgtaggcagtgacaatgtcactgacttcaatgcgatagcaacatgtgattggactaatgctggcgattacatacttgccaacacttgtactgagagactcaagcttttcgcagcagaaacgctcaaagccactgaggaaacatttaagctgtcatatggtattgccactgtacgcgaagtactctctgacagagaattgcatctttcatgggaggttggaaaacctagaccaccattgaacagaaactatgtctttactggttaccgtgtaactaaaaatagtaaagtacagattggagagtacacctttgaaaaaggtgactatggtgatgctgttgtgtacagaggtactacgacatacaagttgaatgttggtgattactttgtgttgacatctcacactgtaatgccacttagtgcacctactctagtgccacaagagcactatgtgagaattactggcttgtacccaacactcaacatctcagatgagttttctagcaatgttgcaaattatcaaaaggtcggcatgcaaaagtactctacactccaaggaccacctggtactggtaagagtcattttgccatcggacttgctctctattacccatctgctcgcatagtgtatacggcatgctctcatgcagctgttgatgccctatgtgaaaaggcattaaaatatttgcccatagataaatgtagtagaatcatacctgcgcgtgcgcgcgtagagtgttttgataaattcaaagtgaattcaacactagaacagtatgttttctgcactgtaaatgcattgccagaaacaactgctgacattgtagtctttgatgaaatctctatggctactaattatgacttgagtgttgtcaatgctagacttcgtgcaaaacactacgtctatattggcgatcctgctcaattaccagccccccgcacattgctgactaaaggcacactagaaccagaatattttaattcagtgtgcagacttatgaaaacaataggtccagacatgttccttggaacttgtcgccgttgtcctgctgaaattgttgacactgtgagtgctttagtttatgacaataagctaaaagcacacaaggataagtcagctcaatgcttcaaaatgttctacaaaggtgttattacacatgatgtttcatctgcaatcaacagacctcaaataggcgttgtaagagaatttcttacacgcaatcctgcttggagaaaagctgtttttatctcaccttataattcacagaacgctgtagcttcaaaaatcttaggattgcctacgcagactgttgattcatcacagggttctgaatatgactatgtcatattcacacaaactactgaaacagcacactcttgtaatgtcaaccgcttcaatgtggctatcacaagggcaaaaattggcattttgtgcataatgtctgatagagatctttatgacaaactgcaatttacaagtctagaaataccacgtcgcaatgtggctacattacaagcagaaaatgtaactggactttttaaggactgtagtaagatcattactggtcttcatcctacacaggcacctacacacctcagcgttgatataaagttcaagactgaaggattatgtgttgacataccaggcataccaaaggacatgacctaccgtagactcatctctatgatgggtttcaaaatgaattaccaagtcaatggttaccctaatatgtttatcacccgcgaagaagctattcgtcacgttcgtgcgtggattggctttgatgtagagggctgtcatgcaactagagatgctgtgggtactaacctacctctccagctaggattttctacaggtgttaacttagtagctgtaccgactggttatgttgacactgaaaataacacagaattcaccagagttaatgcaaaacctccaccaggtgaccagtttaaacatcttataccactcatgtataaaggcttgccctggaatgtagtgcgtattaagatagtacaaatgctcagtgatacactgaaaggattgtcagacagagtcgtgttcgtcctttgggcgcatggctttgagcttacatcaatgaagtactttgtcaagattggacctgaaagaacgtgttgtctgtgtgacaaacgtgcaacttgcttttctacttcatcagatacttatgcctgctggaatcattctgtgggttttgactatgtctataacccatttatgattgatgttcagcagtggggctttacgggtaaccttcagagtaaccatgaccaacattgccaggtacatggaaatgcacatgtggctagttgtgatgctatcatgactagatgtttagcagtccatgagtgctttgttaagcgcgttgattggtctgttgaataccctattataggagatgaactgagggttaattctgcttgcagaaaagtacaacacatggttgtgaagtctgcattgcttgctgataagtttccagttcttcatgacattggaaatccaaaggctatcaagtgtgtgcctcaggctgaagtagaatggaagttctacgatgctcagccatgtagtgacaaagcttacaaaatagaggagctcttctattcttatgctacacatcacgataaattcactgatggtgtttgtttgttttggaattgtaacgttgatcgttacccagccaatgcaattgtgtgtaggtttgacacaagagtcttgtcaaacttgaacttaccaggctgtgatggtggtagtttgtatgtgaataagcatgcattccacactccagctttcgataaaagtgcatttactaatttaaagcaattgcctttcttttactattctgatagtccttgtgagtctcatggcaaacaagtagtgtcggatattgattatgttccactcaaatctgctacgtgtattacacgatgcaatttaggtggtgctgtttgcagacaccatgcaaatgagtaccgacagtacttggatgcatataatatgatgatttctgctggatttagcctatggatttacaaacaatttgatacttataacctgtggaatacatttaccaggttacagagtttagaaaatgtggcttataatgttgttaataaaggacactttgatggacacgccggcgaagcacctgtttccatcattaataatgctgtttacacaaaggtagatggtattgatgtggagatctttgaaaataagacaacacttcctgttaatgttgcatttgagctttgggctaagcgtaacattaaaccagtgccagagattaagatactcaataatttgggtgttgatatcgctgctaatactgtaatctgggactacaaaagagaagccccagcacatgtatctacaataggtgtctgcacaatgactgacattgccaagaaacctactgagagtgcttgttcttcacttactgtcttgtttgatggtagagtggaaggacaggtagacctttttagaaacgcccgtaatggtgttttaataacagaaggttcagtcaaaggtctaacaccttcaaagggaccagcacaagctagcgtcaatggagtcacattaattggagaatcagtaaaaacacagtttaactactttaagaaagtagacggcattattcaacagttgcctgaaacctactttactcagagcagagacttagaggattttaagcccagatcacaaatggaaactgactttctcgagctcgctatggatgaattcatacagcgatataagctcgagggctatgccttcgaacacatcgtttatggagatttcagtcatggacaacttggcggtcttcatttaatgataggcttagccaagcgctcacaagattcaccacttaaattagaggattttatccctatggacagcacagtgaaaaattacttcataacagatgcgcaaacaggttcatcaaaatgtgtgtgttctgtgattgatcttttacttgatgactttgtcgagataataaagtcacaagatttgtcagtgatttcaaaagtggtcaaggttacaattgactatgctgaaatttcattcatgctttggtgtaaggatggacatgttgaaaccttctacccaaaactacaagcaagtcaagcgtggcaaccaggtgttgcgatgcctaacttgtacaagatgcaaagaatgcttcttgaaaagtgtgaccttcagaattatggtgaaaatgctgttataccaaaaggaataatgatgaatgtcgcaaagtatactcaactgtgtcaatacttaaatacacttactttagctgtaccctacaacatgagagttattcactttggtgctggctctgataaaggagttgcaccaggtacagctgtgctcagacaatggttgccaactggcacactacttgtcgattcagatcttaatgacttcgtctccgacgcagattctactttaattggagactgtgcaacagtacatacggctaataaatgggaccttattattagcgatatgtatgaccctaggaccaaacatgtgacaaaagagaatgactctaaagaagggtttttcacttatctgtgtggatttataaagcaaaaactagccctgggtggttctatagctgtaaagataacagagcattcttggaatgctgacctttacaagcttatgggccatttctcatggtggacagcttttgttacaaatgtaaatgcatcatcatcggaagcatttttaattggggctaactatcttggcaagccgaaggaacaaattgatggctataccatgcatgctaactacattttctggaggaacacaaatcctatccagttgtcttcctattcactctttgacatgagcaaatttcctcttaaattaagaggaactgctgtaatgtctcttaaggagaatcaaatcaatgatatgatttattctcttctggaaaaaggtaggcttatcattagagaaaacaacagagttgtggtttcaagtgatattcttgttaacaactaaacgaacatgtttattttcttattatttcttactctcactagtggtagtgaccttgaccggtgcaccacttttgatgatgttcaagctcctaattacactcaacatacttcatctatgaggggggtttactatcctgatgaaatttttagatcagacactctttatttaactcaggatttatttcttccattttattctaatgttacagggtttcatactattaatcatacgtttggcaaccctgtcataccttttaaggatggtatttattttgctgccacagagaaatcaaatgttgtccgtggttgggtttttggttctaccatgaacaacaagtcacagtcggtgattattattaacaattctactaatgttgttatacgagcatgtaactttgaattgtgtgacaaccctttctttgctgtttctaaacccatgggtacacagacacatactatgatattcgataatgcatttaattgcactttcgagtacatatctgatgccttttcgcttgatgtttcagaaaagtcaggtaattttaaacacttacgagagtttgtgtttaaaaataaagatgggtttctctatgtttataagggctatcaacctatagatgtagttcgtgatctaccttctggttttaacactttgaaacctatttttaagttgcctcttggtattaacattacaaattttagagccattcttacagccttttcacctgctcaagacatttggggcacgtcagctgcagcctattttgttggctatttaaagccaactacatttatgctcaagtatgatgaaaatggtacaatcacagatgctgttgattgttctcaaaatccacttgctgaactcaaatgctctgttaagagctttgagattgacaaaggaatttaccagacctctaatttcagggttgttccctcaggagatgttgtgagattccctaatattacaaacttgtgtccttttggagaggtttttaatgctactaaattcccttctgtctatgcatgggagagaaaaaaaatttctaattgtgttgctgattactctgtgctctacaactcaacatttttttcaacctttaagtgctatggcgtttctgccactaagttgaatgatctttgcttctccaatgtctatgcagattcttttgtagtcaagggagatgatgtaagacaaatagcgccaggacaaactggtgttattgctgattataattataaattgccagatgatttcatgggttgtgtccttgcttggaatactaggaacattgatgctacttcaactggtaattataattataaatataggtatcttagacatggcaagcttaggccctttgagagagacatatctaatgtgcctttctcccctgatggcaaaccttgcaccccacctgctcttaattgttattggccattaaatgattatggtttttacaccactactggcattggctaccaaccttacagagttgtagtactttcttttgaacttttaaatgcaccggccacggtttgtggaccaaaattatccactgaccttattaagaaccagtgtgtcaattttaattttaatggactcactggtactggtgtgttaactccttcttcaaagagatttcaaccatttcaacaatttggccgtgatgtttctgatttcactgattccgttcgagatcctaaaacatctgaaatattagacatttcaccttgctcttttgggggtgtaagtgtaattacacctggaacaaatgcttcatctgaagttgctgttctatatcaagatgttaactgcactgatgtttctacagcaattcatgcagatcaactcacaccagcttggcgcatatattctactggaaacaatgtattccagactcaagcaggctgtcttataggagctgagcatgtcgacacttcttatgagtgcgacattcctattggagctggcatttgtgctagttaccatacagtttctttattacgtagtactagccaaaaatctattgtggcttatactatgtctttaggtgctgatagttcaattgcttactctaataacaccattgctatacctactaacttttcaattagcattactacagaagtaatgcctgtttctatggctaaaacctccgtagattgtaatatgtacatctgcggagattctactgaatgtgctaatttgcttctccaatatggtagcttttgcacacaactaaatcgtgcactctcaggtattgctgctgaacaggatcgcaacacacgtgaagtgttcgctcaagtcaaacaaatgtacaaaaccccaactttgaaatattttggtggttttaatttttcacaaatattacctgaccctctaaagccaactaagaggtcttttattgaggacttgctctttaataaggtgacactcgctgatgctggcttcatgaagcaatatggcgaatgcctaggtgatattaatgctagagatctcatttgtgcgcagaagttcaatggacttacagtgttgccacctctgctcactgatgatatgattgctgcctacactgctgctctagttagtggtactgccactgctggatggacatttggtgctggcgctgctcttcaaataccttttgctatgcaaatggcatataggttcaatggcattggagttacccaaaatgttctctatgagaaccaaaaacaaatcgccaaccaatttaacaaggcgattagtcaaattcaagaatcacttacaacaacatcaactgcattgggcaagctgcaagacgttgttaaccagaatgctcaagcattaaacacacttgttaaacaacttagctctaattttggtgcaatttcaagtgtgctaaatgatatcctttcgcgacttgataaagtcgaggcggaggtacaaattgacaggttaattacaggcagacttcaaagccttcaaacctatgtaacacaacaactaatcagggctgctgaaatcagggcttctgctaatcttgctgctactaaaatgtctgagtgtgttcttggacaatcaaaaagagttgacttttgtggaaagggctaccaccttatgtccttcccacaagcagccccgcatggtgttgtcttcctacatgtcacgtatgtgccatcccaggagaggaacttcaccacagcgccagcaatttgtcatgaaggcaaagcatacttccctcgtgaaggtgtttttgtgtttaatggcacttcttggtttattacacagaggaacttcttttctccacaaataattactacagacaatacatttgtctcaggaaattgtgatgtcgttattggcatcattaacaacacagtttatgatcctctgcaacctgagcttgactcattcaaagaagagctggacaagtacttcaaaaatcatacatcaccagatgttgatcttggcgacatttcaggcattaacgcttctgtcgtcaacattcaaaaagaaattgaccgcctcaatgaggtcgctaaaaatttaaatgaatcactcattgaccttcaagaattgggaaaatatgagcaatatattaaatggccttggtatgtttggctcggcttcattgctggactaattgccatcgtcatggttacaatcttgctttgttgcatgactagttgttgcagttgcctcaagggtgcatgctcttgtggttcttgctgcaagtttgatgaggatgactctgagccagttctcaagggtgtcaaattacattacacataaacgaacttatggatttgtttatgagattttttactcttggatcaattactgcacagccagtaaaaattgacaatgcttctcctgcaagtactgttcatgctacagcaacgataccgctacaagcctcactccctttcggatggcttgttattggcgttgcatttcttgctgtttttcagagcgctaccaaaataattgcgctcaataaaagatggcagctagccctttataagggcttccagttcatttgcaatttactgctgctatttgttaccatctattcacatcttttgcttgtcgctgcaggtatggaggcgcaatttttgtacctctatgccttgatatattttctacaatgcatcaacgcatgtagaattattatgagatgttggctttgttggaagtgcaaatccaagaacccattactttatgatgccaactactttgtttgctggcacacacataactatgactactgtataccatataacagtgtcacagatacaattgtcgttactgaaggtgacggcatttcaacaccaaaactcaaagaagactaccaaattggtggttattctgaggataggcactcaggtgttaaagactatgtcgttgtacatggctatttcaccgaagtttactaccagcttgagtctacacaaattactacagacactggtattgaaaatgctacattcttcatctttaacaagcttgttaaagacccaccgaatgtgcaaatacacacaatcgacggctcttcaggagttgctaatccagcaatggatccaatttatgatgagccgacgacgactactagcgtgcctttgtaagcacaagaaagtgagtacgaacttatgtactcattcgtttcggaagaaacaggtacgttaatagttaatagcgtacttctttttcttgctttcgtggtattcttgctagttacactagccatccttactgcgcttcgattgtgtgcgtactgctgcaatattgttaacgtgagtttagtaaaaccaacggtttacgtctactcgcgtgttaaaaatctgaactcttctgaaggagttcctgatcttctggtctaaacgaactaactattattattattctgtttggaactttaacattgcttatcatggcagacaacggtactattaccgttgaggagcttaaacaactcctggaacaatggaacctagtaataggtttcctatgcctagcctggattatgttactacaatttgcctattctaatcggaacaggtttttgtacataataaagcttgttttcctctggctcttgtggccagtaacacttgcttgttttgtgcttgctgctgtctacagaattacttgggtgactggcgggattgcgattgcaatggcttgtattgtaggcttgatgtggcttagctacttcgttgcttccttcaggctgtttgctcgtacccgctcaatgtggtcattcaacccagaaacaaacattcttctcaatgtgcctctccgggggacaattgtgaccagaccgctcatggaaagtgaacttgtcattggtgctgtgatcattcgtggtcacttgcgaatggccggacactccctagggcgctgtgacattaaggacctgccaaaagagatcactgtggctacatcacgaacgctttcttattacaaattaggagcgtcgcagcgtgtaggcactgattcaggttttgctgcatacaaccgctaccgtattggaaactataaattaaatacagaccacgccggtagcaacgacaatattgctttgctagtacagtaagtgacaacagatgtttcatcttgttgacttccaggttacaatagcagagatattgattatcattatgaggactttcaggattgctatttggaatcttgacgttataataagttcaatagtgagacaattatttaagcctctaactaagaagaattattcggagttagatgatgaagaacctatggagttagattatccataaaacgaacatgaaaattattctcttcctgacattgattgtatttacatcttgcgagctatatcactatcaggagtgtgttagaggtacgactgtactactaaaagaaccttgcccatcaggaacatacgagggcaattcaccatttcaccctcttgctgacaataaatttgcactaacttgcactagcacacactttgcttttgcttgtgctgacggtactcgacatacctatcagctgcgtgcaagatcagtttcaccaaaacttttcatcagacaagaggaggttcaacaagagctctactcgccactttttctcattgttgctgctctagtatttttaatactttgcttcaccattaagagaaagacagaatgaatgagctcactttaattgacttctatttgtgctttttagcctttctgctattccttgttttaataatgcttattatattttggttttcactcgaaatccaggatctagaagaaccttgtaccaaagtctaaacgaacatgaaacttctcattgttttgacttgtatttctttatgcagttgcatatgcactgtagtacagcgctgtgcatctaataaacctcatgtgcttgaagatccttgtaaggtacaacactaggggtaatacttatagcactgcttggctttgtgctctaggaaaggttttaccttttcatagatggcacactatggttcaaacatgcacacctaatgttactatcaactgtcaagatccagctggtggtgcgcttatagctaggtgttggtaccttcatgaaggtcaccaaactgctgcatttagagacgtacttgttgttttaaataaacgaacaaattaaaatgtctgataatggaccccaatcaaaccaacgtagtgccccccgcattacatttggtggacccacagattcaactgacaataaccagaatggaggacgcaatggggcaaggccaaaacagcgccgaccccaaggtttacccaataatactgcgtcttggttcacagctctcactcagcatggcaaggaggaacttagattccctcgaggccagggcgttccaatcaacaccaatagtggtccagatgaccaaattggctactaccgaagagctacccgacgagttcgtggtggtgacggcaaaatgaaagagctcagccccagatggtacttctattacctaggaactggcccagaagcttcacttccctacggcgctaacaaagaaggcatcgtatgggttgcaactgagggagccttgaatacacccaaagaccacattggcacccgcaatcctaataacaatgctgccaccgtgctacaacttcctcaaggaacaacattgccaaaaggcttctacgcagagggaagcagaggcggcagtcaagcctcttctcgctcctcatcacgtagtcgcggtaattcaagaaattcaactcctggcagcagtaggggaaattctcctgctcgaatggctagcggaggtggtgaaactgccctcgcgctattgctgctagacagattgaaccagcttgagagcaaagtttctggtaaaggccaacaacaacaaggccaaactgtcactaagaaatctgctgctgaggcatctaaaaagcctcgccaaaaacgtactgccacaaaacagtacaacgtcactcaagcatttgggagacgtggtccagaacaaacccaaggaaatttcggggaccaagacctaatcagacaaggaactgattacaaacattggccgcaaattgcacaatttgctccaagtgcctctgcattctttggaatgtcacgcattggcatggaagtcacaccttcgggaacatggctgacttatcatggagccattaaattggatgacaaagatccacaattcaaagacaacgtcatactgctgaacaagcacattgacgcatacaaaacattcccaccaacagagcctaaaaaggacaaaaagaaaaagactgatgaagctcagcctttgccgcagagacaaaagaagcagcccactgtgactcttcttcctgcggctgacatggatgatttctccagacaacttcaaaattccatgagtggagcttctgctgattcaactcaggcataaacactcatgatgaccacacaaggcagatgggctatgtaaacgttttcgcaattccgtttacgatacatagtctactcttgtgcagaatgaattctcgtaactaaacagcacaagtaggtttagttaactttaatctcacatagcaatctttaatcaatgtgtaacattagggaggacttgaaagagccaccacattttcatcgaggccacgcggagtacgatcgagggtacagtgaataatgctagggagagct

SEQ ID NO: 73 - DNA, 29751 bp, Coronavirus
atattaggtttttacctacccaggaaaagccaaccaacctcgatctcttgtagatctgttctctaaacgaactttaaaatctgtgtagctgtcgctcggctgcatgcctagtgcacctacgcagtataaacaataataaattttactgtcgttgacaagaaacgagtaactcgtccctcttctgcagactgcttacggtttcgtccgtgttgcagtcgatcatcagcatacctaggtttcgtccgggtgtgaccgaaaggtaagatggagagccttgttcttggtgtcaacgagaaaacacacgtccaactcagtttgcctgtccttcaggttagagacgtgctagtgcgtggcttcggggactctgtggaagaggccctatcggaggcacgtgaacacctcaaaaatggcacttgtggtctagtagagctggaaaaaggcgtactgccccagcttgaacagccctatgtgttcattaaacgttctgatgccttaagcaccaatcacggccacaaggtcgttgagctggttgcagaaatggacggcattcagtacggtcgtagcggtataacactgggagtactcgtgccacatgtgggcgaaaccccaattgcataccgcaatgttcttcttcgtaagaacggtaataagggagccggtggtcatagctatggcatcgatctaaagtcttatgacttaggtgacgagcttggcactgatcccattgaagattatgaacaaaactggaacactaagcatggcagtggtgcactccgtgaactcactcgtgagctcaatggaggtgcagtcactcgctatgtcgacaacaatttctgtggcccagatgggtaccctcttgattgcatcaaagattttctcgcacgcgcgggcaagtcaatgtgcactctttccgaacaacttgattacatcgagtcgaagagaggtgtctactgctgccgtgaccatgagcatgaaattgcctggttcactgagcgctctgataagagctacgagcaccagacacccttcgaaattaagagtgccaagaaatttgacactttcaaaggggaatgcccaaagtttgtgtttcctcttaactcaaaagtcaaagtcattcaaccacgtgttgaaaagaaaaagactgagggtttcatggggcgtatacgctctgtgtaccctgttgcatctccacaggagtgtaacaatatgcacttgtctaccttgatgaaatgtaatcattgcgatgaagtttcatggcagacgtgcgactttctgaaagccacttgtgaacattgtggcactgaaaatttagttattgaaggacctactacatgtgggtacctacctactaatgctgtagtgaaaatgccatgtcctgcctgtcaagacccagagattggacctgagcatagtgttgcagattatcacaaccactcaaacattgaaactcgactccgcaagggaggtaggactagatgttttggaggctgtgtgtttgcctatgttggctgctataataagcgtgcctactgggttcctcgtgctagtgctgatattggctcaggccatactggcattactggtgacaatgtggagaccttgaatgaggatctccttgagatactgagtcgtgaacgtgttaacattaacattgttggcgattttcatttgaatgaagaggttgccatcattttggcatctttctctgcttctacaagtgcctttattgacactataaagagtcttgattacaagtctttcaaaaccattgttgagtcctgcggtaactataaagttaccaagggaaagcccgtaaaaggtgcttggaacattggacaacagagatcagttttaacaccactgtgtggttttccctcacaggctgctggtgttatcagatcaatttttgcgcgcacacttgatgcagcaaaccactcaattcctgatttgcaaagagcagctgtcaccatacttgatggtatttctgaacagtcattacgtcttgtcgacgccatggtttatacttcagacctgctcaccaacagtgtcattattatggcatatgtaactggtggtcttgtacaacagacttctcagtggttgtctaatcttttgggcactactgttgaaaaactcaggcctatctttgaatggattgaggcgaaacttagtgcaggagttgaatttctcaaggatgcttgggagattctcaaatttctcattacaggtgtttttgacatcgtcaagggtcaaatacaggttgcttcagataacatcaaggattgtgtaaaatgcttcattgatgttgttaacaaggcactcgaaatgtgcattgatcaagtcactatcgctggcgcaaagttgcgatcactcaacttaggtgaagtcttcatcgctcaaagcaagggactttaccgtcagtgtatacgtggcaaggagcagctgcaactactcatgcctcttaaggcaccaaaagaagtaacctttcttgaaggtgattcacatgacacagtacttacctctgaggaggttgttctcaagaacggtgaactcgaagcactcgagacgcccgttgatagcttcacaaatggagctatcgttggcacaccagtctgtgtaaatggcctcatgctcttagagattaaggacaaagaacaatactgcgcattgtctcctggtttactggctacaaacaatgtctttcgcttaaaagggggtgcaccaattaaaggtgtaacctttggagaagatactgtttgggaagttcaaggttacaagaatgtgagaatcacatttgagcttgatgaacgtgttgacaaagtgcttaatgaaaagtgctctgtctacactgttgaatccggtaccgaagttactgagtttgcatgtgttgtagcagaggctgttgtgaagactttacaaccagtttctgatctccttaccaacatgggtattgatcttgatgagtggagtgtagctacattctacttatttgatgatgctggtgaagaaaacttttcatcacgtatgtattgttccttttaccctccagatgaggaagaagaggacgatgcagagtgtgaggaagaagaaattgatgaaacctgtgaacatgagtacggtacagaggatgattatcaaggtctccctctggaatttggtgcctcagctgaaacagttcgagttgaggaagaagaagaggaagactggctggatgatactactgagcaatcagagattgagccagaaccagaacctacacctgaagaaccagttaatcagtttactggttatttaaaacttactgacaatgttgccattaaatgtgttgacatcgttaaggaggcacaaagtgctaatcctatggtgattgtaaatgctgctaacatacacctgaaacatggtggtggtgtagcaggtgcactcaacaaggcaaccaatggtgccatgcaaaaggagagtgatgattacattaagctaaatggccctcttacagtaggagggtcttgtttgctttctggacataatcttgctaagaagtgtctgcatgttgttggacctaacctaaatgcaggtgaggacatccagcttcttaaggcagcatatgaaaatttcaattcacaggacatcttacttgcaccattgttgtcagcaggcatatttggtgctaaaccacttcagtctttacaagtgtgcgtgcagacggttcgtacacaggtttatattgcagtcaatgacaaagctctttatgagcaggttgtcatggattatcttgataacctgaagcctagagtggaagcacctaaacaagaggagccaccaaacacagaagattccaaaactgaggagaaatctgtcgtacagaagcctgtcgatgtgaagccaaaaattaaggcctgcattgatgaggttaccacaacactggaagaaactaagtttcttaccaataagttactcttgtttgctgatatcaatggtaagctttaccatgattctcagaacatgcttagaggtgaagatatgtctttccttgagaaggatgcaccttacatggtaggtgatgttatcactagtggtgatatcacttgtgttgtaataccctccaaaaaggctggtggcactactgagatgctctcaagagctttgaagaaagtgccagttgatgagtatataaccacgtaccctggacaaggatgtgctggttatacacttgaggaagctaagactgctcttaagaaatgcaaatctgcattttatgtactaccttcagaagcacctaatgctaaggaagagattctaggaactgtatcctggaatttgagagaaatgcttgctcatgctgaagagacaagaaaattaatgcctatatgcatggatgttagagccataatggcaaccatccaacgtaagtataaaggaattaaaattcaagagggcatcgttgactatggtgtccgattcttcttttatactagtaaagagcctgtagcttctattattacgaagctgaactctctaaatgagccgcttgtcacaatgccaattggttatgtgacacatggttttaatcttgaagaggctgcgcgctgtatgcgttctcttaaagctcctgccgtagtgtcagtatcatcaccagatgctgttactacatataatggatacctcacttcgtcatcaaagacatctgaggagcactttgtagaaacagtttctttggctggctcttacagagattggtcctattcaggacagcgtacagagttaggtgttgaatttcttaagcgtggtgacaaaattgtgtaccacactctggagagccccgtcgagtttcatcttgacggtgaggttctttcacttgacaaactaaagagtctcttatccctgcgggaggttaagactataaaagtgttcacaactgtggacaacactaatctccacacacagcttgtggatatgtctatgacatatggacagcagtttggtccaacatacttggatggtgctgatgttacaaaaattaaacctcatgtaaatcatgagggtaagactttctttgtactacctagtgatgacacactacgtagtgaagctttcgagtactaccatactcttgatgagagttttcttggtaggtacatgtctgctttaaaccacacaaagaaatggaaatttcctcaagttggtggtttaacttcaattaaatgggctgataacaattgttatttgtctagtgttttattagcacttcaacagcttgaagtcaaattcaatgcaccagcacttcaagaggcttattatagagcccgtgctggtgatgctgctaacttttgtgcactcatactcgcttacagtaataaaactgttggcgagcttggtgatgtcagagaaactatgacccatcttctacagcatgctaatttggaatctgcaaagcgagttcttaatgtggtgtgtaaacattgtggtcagaaaactactaccttaacgggtgtagaagctgtgatgtatatgggtactctatcttatgataatcttaagacaggtgtttccattccatgtgtgtgtggtcgtgatgctacacaatatctagtacaacaagagtcttcttttgttatgatgtctgcaccacctgctgagtataaattacagcaaggtacattcttatgtgcgaatgagtacactggtaactatcagtgtggtcattacactcatataactgctaaggagaccctctatcgtattgacggagctcaccttacaaagatgtcagagtacaaaggaccagtgactgatgttttctacaaggaaacatcttacactacaaccatcaagcctgtgtcgtataaactcgatggagttacttacacagagattgaaccaaaattggatgggtattataaaaaggataatgcttactatacagagcagcctatagaccttgtaccaactcaaccattaccaaatgcgagttttgataatttcaaactcacatgttctaacacaaaatttgctgatgatttaaatcaaatgacaggcttcacaaagccagcttcacgagagctatctgtcacattcttcccagacttgaatggcgatgtagtggctattgactatagacactattcagcgagtttcaagaaaggtgctaaattactgcataagccaattgtttggcacattaaccaggctacaaccaagacaacgttcaaaccaaacacttggtgtttacgttgtctttggagtacaaagccagtagatacttcaaattcatttgaagttctggcagtagaagacacacaaggaatggacaatcttgcttgtgaaagtcaacaacccacctctgaagaagtagtggaaaatcctaccatacagaaggaagtcatagagtgtgacgtgaaaactaccgaagttgtaggcaatgtcatacttaaaccatcagatgaaggtgttaaagtaacacaagagttaggtcatgaggatcttatggctgcttatgtggaaaacacaagcattaccattaagaaacctaatgagctttcactagccttaggtttaaaaacaattgccactcatggtattgctgcaattaatagtgttccttggagtaaaattttggcttatgtcaaaccattcttaggacaagcagcaattacaacatcaaattgcgctaagagattagcacaacgtgtgtttaacaattatatgccttatgtgtttacattattgttccaattgtgtacttttactaaaagtaccaattctagaattagagcttcactacctacaactattgctaaaaatagtgttaagagtgttgctaaattatgtttggatgccggcattaattatgtgaagtcacccaaattttctaaattgttcacaatcgctatgtggctattgttgttaagtatttgcttaggttctctaatctgtgtaactgctgcttttggtgtactcttatctaattttggtgctccttcttattgtaatggcgttagagaattgtatcttaattcgtctaacgttactactatggatttctgtgaaggttcttttccttgcagcatttgtttaagtggattagactcccttgattcttatccagctcttgaaaccattcaggtgacgatttcatcgtacaagctagacttgacaattttaggtctggccgctgagtgggttttggcatatatgttgttcacaaaattcttttatttattaggtctttcagctataatgcaggtgttctttggctattttgctagtcatttcatcagcaattcttggctcatgtggtttatcattagtattgtacaaatggcacccgtttctgcaatggttaggatgtacatcttctttgcttctttctactacatatggaagagctatgttcatatcatggatggttgcacctcttcgacttgcatgatgtgctataagcgcaatcgtgccacacgcgttgagtgtacaactattgttaatggcatgaagagatctttctatgtctatgcaaatggaggccgtggcttctgcaagactcacaattggaattgtctcaattgtgacacattttgcactggtagtacattcattagtgatgaagttgctcgtgatttgtcactccagtttaaaagaccaatcaaccctactgaccagtcatcgtatattgttgatagtgttgctgtgaaaaatggcgcgcttcacctctactttgacaaggctggtcaaaagacctatgagagacatccgctctcccattttgtcaatttagacaatttgagagctaacaacactaaaggttcactgcctattaatgtcatagtttttgatggcaagtccaaatgcgacgagtctgcttctaagtctgcttctgtgtactacagtcagctgatgtgccaacctattctgttgcttgaccaagctcttgtatcagacgttggagatagtactgaagtttccgttaagatgtttgatgcttatgtcgacaccttttcagcaacttttagtgttcctatggaaaaacttaaggcacttgttgctacagctcacagcgagttagcaaagggtgtagctttagatggtgtcctttctacattcgtgtcagctgcccgacaaggtgttgttgataccgatgttgacacaaaggatgttattgaatgtctcaaactttcacatcactctgacttagaagtgacaggtgacagttgtaacaatttcatgctcacctataataaggttgaaaacatgacgcccagagatcttggcgcatgtattgactgtaatgcaaggcatatcaatgcccaagtagcaaaaagtcacaatgtttcactcatctggaatgtaaaagactacatgtctttatctgaacagctgcgtaaacaaattcgtagtgctgccaagaagaacaacataccttttagactaacttgtgctacaactagacaggttgtcaatgtcataactactaaaatctcactcaagggtggtaagattgttagtacttgttttaaacttatgcttaaggccacattattgtgcgttcttgctgcattggtttgttatatcgttatgccagtacatacattgtcaatccatgatggttacacaaatgaaatcattggttacaaagccattcaggatggtgtcactcgtgacatcatttctactgatgattgttttgcaaataaacatgctggttttgacgcatggtttagccagcgtggtggttcatacaaaaatgacaaaagctgccctgtagtagctgctatcattacaagagagattggtttcatagtgcctggcttaccgggtactgtgctgagagcaatcaatggtgacttcttgcattttctacctcgtgtttttagtgctgttggcaacatttgctacacaccttccaaactcattgagtatagtgattttgctacctctgcttgcgttcttgctgctgagtgtacaatttttaaggatgctatgggcaaacctgtgccatattgttatgacactaatttgctagagggttctatttcttatagtgagcttcgtccagacactcgttatgtgcttatggatggttccatcatacagtttcctaacacttacctggagggttctgttagagtagtaacaacttttgatgctgagtactgtagacatggtacatgcgaaaggtcagaagtaggtatttgcctatctaccagtggtagatgggttcttaataatgagcattacagagctctatcaggagttttctgtggtgttgatgcgatgaatctcatagctaacatctttactcctcttgtgcaacctgtgggtgctttagatgtgtctgcttcagtagtggctggtggtattattgccatattggtgacttgtgctgcctactactttatgaaattcagacgtgtttttggtgagtacaaccatgttgttgctgctaatgcacttttgtttttgatgtctttcactatactctgtctggtaccagcttacagctttctgccgggagtctactcagtcttttacttgtacttgacattctatttcaccaatgatgtttcattcttggctcaccttcaatggtttgccatgttttctcctattgtgcctttttggataacagcaatctatgtattctgtatttctctgaagcactgccattggttctttaacaactatcttaggaaaagagtcatgtttaatggagttacatttagtaccttcgaggaggctgctttgtgtacctttttgctcaacaaggaaatgtacctaaaattgcgtagcgagacactgttgccacttacacagtataacaggtatcttgctctatataacaagtacaagtatttcagtggagccttagatactaccagctatcgtgaagcagcttgctgccacttagcaaaggctctaaatgactttagcaactcaggtgctgatgttctctaccaaccaccacagacatcaatcacttctgctgttctgcagagtggttttaggaaaatggcattcccgtcaggcaaagttgaagggtgcatggtacaagtaacctgtggaactacaactcttaatggattgtggttggatgacacagtatactgtccaagacatgtcatttgcacagcagaagacatgcttaatcctaactatgaagatctgctcattcgcaaatccaaccatagctttcttgttcaggctggcaatgttcaacttcgtgttattggccattctatgcaaaattgtctgcttaggcttaaagttgatacttctaaccctaagacacccaagtataaatttgtccgtatccaacctggtcaaacattttcagttctagcatgctacaatggttcaccatctggtgtttatcagtgtgccatgagacctaatcataccattaaaggttctttccttaatggatcatgtggtagtgttggttttaacattgattatgattgcgtgtctttctgctatatgcatcatatggagcttccaacaggagtacacgctggtactgacttagaaggtaaattctatggtccatttgttgacagacaaactgcacaggctgcaggtacagacacaaccataacattaaatgttttggcatggctgtatgctgctgttatcaatggtgataggtggtttcttaatagattcaccactactttgaatgactttaaccttgtggcaatgaagtacaactatgaacctttgacacaagatcatgttgacatattgggacctctttctgctcaaacaggaattgccgtcttagatatgtgtgctgctttgaaagagctgctgcagaatggtatgaatggtcgtactatccttggtagcactattttagaagatgagtttacaccatttgatgttgttagacaatgctctggtgttaccttccaaggtaagttcaagaaaattgttaagggcactcatcattggatgcttttaactttcttgacatcactattgattcttgttcaaagtacacagtggtcactgtttttctttgtttacgagaatgctttcttgccatttactcttggtattatggcaattgctgcatgtgctatgctgcttgttaagcataagcacgcattcttgtgcttgtttctgttaccttctcttgcaacagttgcttactttaatatggtctacatgcctgctagctgggtgatgcgtatcatgacatggcttgaattggctgacactagcttgtctggttataggcttaaggattgtgttatgtatgcttcagctttagttttgcttattctcatgacagctcgcactgtttatgatgatgctgctagacgtgtttggacactgatgaatgtcattacacttgtttacaaagtctactatggtaatgctttagatcaagctatttccatgtgggccttagttatttctgtaacctctaactattctggtgtcgttacgactatcatgtttttagctagagctatagtgtttgtgtgtgttgagtattacccattgttatttattactggcaacaccttacagtgtatcatgcttgtttattgtttcttaggctattgttgctgctgctactttggccttttctgtttactcaaccgttacttcaggcttactcttggtgtttatgactacttggtctctacacaagaatttaggtatatgaactcccaggggcttttgcctcctaagagtagtattgatgctttcaagcttaacattaagttgttgggtattggaggtaaaccatgtatcaaggttgctactgtacagtctaaaatgtctgacgtaaagtgcacatctgtggtactgctctcggttcttcaacaacttagagtagagtcatcttctaaattgtgggcacaatgtgtacaactccacaatgatattcttcttgcaaaagacacaactgaagctttcgagaagatggtttctcttttgtctgttttgctatccatgcagggtgctgtagacattaataggttgtgcgaggaaatgctcgataaccgtgctactcttcaggctattgcttcagaatttagttctttaccatcatatgccgcttatgccactgcccaggaggcctatgagcaggctgtagctaatggtgattctgaagtcgttctcaaaaagttaaagaaatctttgaatgtggctaaatctgagtttgaccgtgatgctgccatgcaacgcaagttggaaaagatggcagatcaggctatgacccaaatgtacaaacaggcaagatctgaggacaagagggcaaaagtaactagtgctatgcaaacaatgctcttcactatgcttaggaagcttgataatgatgcacttaacaacattatcaacaatgcgcgtgatggttgtgttccactcaacatcataccattgactacagcagccaaactcatggttgttgtccctgattatggtacctacaagaacacttgtgatggtaacacctttacatatgcatctgcactctgggaaatccagcaagttgttgatgcggatagcaagattgttcaacttagtgaaattaacatggacaattcaccaaatttggcttggcctcttattgttacagctctaagagccaactcagctgttaaactacagaataatgaactgagtccagtagcactacgacagatgtcctgtgcggctggtaccacacaaacagcttgtactgatgacaatgcacttgcctactataacaattcgaagggaggtaggtttgtgctggcattactatcagaccaccaagatctcaaatgggctagattccctaagagtgatggtacaggtacaatttacacagaactggaaccaccttgtaggtttgttacagacacaccaaaagggcctaaagtgaaatacttgtacttcatcaaaggcttaaacaacctaaatagaggtatggtgctgggcagtttagctgctacagtacgtcttcaggctggaaatgctacagaagtacctgccaattcaactgtgctttccttctgtgcttttgcagtagaccctgctaaagcatataaggattacctagcaagtggaggacaaccaatcaccaactgtgtgaagatgttgtgtacacacactggtacaggacaggcaattactgtaacaccagaagctaacatggaccaagagtcctttggtggtgcttcatgttgtctgtattgtagatgccacattgaccatccaaatcctaaaggattctgtgacttgaaaggtaagtacgtccaaatacctaccacttgtgctaatgacccagtgggttttacacttagaaacacagtctgtaccgtctgcggaatgtggaaaggttatggctgtagttgtgaccaactccgcgaacccttgatgcagtctgcggatgcatcaacgtttttaaacgggtttgcggtgtaagtgcagcccgtcttacaccgtgcggcacaggcactagtactgatgtcgtctacagggcttttgatatttacaacgaaaaagttgctggttttgcaaagttcctaaaaactaattgctgtcgcttccaggagaaggatgaggaaggcaatttattagactcttactttgtagttaagaggcatactatgtctaactaccaacatgaagagactatttataacttggttaaagattgtccagcggttgctgtccatgactttttcaagtttagagtagatggtgacatggtaccacatatatcacgtcagcgtctaactaaatacacaatggctgatttagtctatgctctacgtcattttgatgagggtaattgtgatacattaaaagaaatactcgtcacatacaattgctgtgatgatgattatttcaataagaaggattggtatgacttcgtagagaatcctgacatcttacgcgtatatgctaacttaggtgagcgtgtacgccaatcattattaaagactgtacaattctgcgatgctatgcgtgatgcaggcattgtaggcgtactgacattagataatcaggatcttaatgggaactggtacgatttcggtgatttcgtacaagtagcaccaggctgcggagttcctattgtggattcatattactcattgctgatgcccatcctcactttgactagggcattggctgctgagtcccatatggatgctgatctcgcaaaaccacttattaagtgggatttgctgaaatatgattttacggaagagagactttgtctcttcgaccgttattttaaatattgggaccagacataccatcccaattgtattaactgtttggatgataggtgtatccttcattgtgcaaactttaatgtgttattttctactgtgtttccacctacaagttttggaccactagtaagaaaaatatttgtagatggtgttccttttgttgtttcaactggataccattttcgtgagttaggagtcgtacataatcaggatgtaaacttacatagctcgcgtctcagtttcaaggaacttttagtgtatgctgctgatccagctatgcatgcagcttctggcaatttattgctagataaacgcactacatgcttttcagtagctgcactaacaaacaatgttgcttttcaaactgtcaaacccggtaattttaataaagacttttatgactttgctgtgtctaaaggtttctttaaggaaggaagttctgttgaactaaaacacttcttctttgctcaggatggcaacgctgctatcagtgattatgactattatcgttataatctgccaacaatgtgtgatatcagacaactcctattcgtagttgaagttgttgataaatactttgattgttacgatggtggctgtattaatgccaaccaagtaatcgttaacaatctggataaatcagctggtttcccatttaataaatggggtaaggctagactttattatgactcaatgagttatgaggatcaagatgcacttttcgcgtatactaagcgtaatgtcatccctactataactcaaatgaatcttaagtatgccattagtgcaaagaatagagctcgcaccgtagctggtgtctctatctgtagtactatgacaaatagacagtttcatcagaaattattgaagtcaatagccgccactagaggagctactgtggtaattggaacaagcaagttttacggtggctggcataatatgttaaaaactgtttacagtgatgtagaaactccacaccttatgggttgggattatccaaaatgtgacagagccatgcctaacatgcttaggataatggcctctcttgttcttgctcgcaaacataacacttgctgtaacttatcacaccgtttctacaggttagctaacgagtgtgcgcaagtattaagtgagatggtcatgtgtggcggctcactatatgttaaaccaggtggaacatcatccggtgatgctacaactgcttatgctaatagtgtctttaacatttgtcaagctgttacagccaatgtaaatgcacttctttcaactgatggtaataagatagctgacaagtatgtccgcaatctacaacacaggctctatgagtgtctctatagaaatagggatgttgatcatgaattcgtggatgagttttacgcttacctgcgtaaacatttctccatgatgattctttctgatgatgccgttgtgtgctataacagtaactatgcggctcaaggtttagtagctagcattaagaactttaaggcagttctttattatcaaaataatgtgttcatgtctgaggcaaaatgttggactgagactgaccttactaaaggacctcacgaattttgctcacagcatacaatgctagttaaacaaggagatgattacgtgtacctgccttacccagatccatcaagaatattaggcgcaggctgttttgtcgatgatattgtcaaaacagatggtacacttatgattgaaaggttcgtgtcactggctattgatgcttacccacttacaaaacatcctaatcaggagtatgctgatgtctttcacttgtatttacaatacattagaaagttacatgatgagcttactggccacatgttggacatgtattccgtaatgctaactaatgataacacctcacggtactgggaacctgagttttatgaggctatgtacacaccacatacagtcttgcaggctgtaggtgcttgtgtattgtgcaattcacagacttcacttcgttgcggtgcctgtattaggagaccattcctatgttgcaagtgctgctatgaccatgtcatttcaacatcacacaaattagtgttgtctgttaatccctatgtttgcaatgccccaggttgtgatgtcactgatgtgacacaactgtatctaggaggtatgagctattattgcaagtcacataagcctcccattagttttccattatgtgctaatggtcaggtttttggtttatacaaaaacacatgtgtaggcagtgacaatgtcactgacttcaatgcgatagcaacatgtgattggactaatgctggcgattacatacttgccaacacttgtactgagagactcaagcttttcgcagcagaaacgctcaaagccactgaggaaacatttaagctgtcatatggtattgccactgtacgcgaagtactctctgacagagaattgcatctttcatgggaggttggaaaacctagaccaccattgaacagaaactatgtctttactggttaccgtgtaactaaaaatagtaaagtacagattggagagtacacctttgaaaaaggtgactatggtgatgctgttgtgtacagaggtactacgacatacaagttgaatgttggtgattactttgtgttgacatctcacactgtaatgccacttagtgcacctactctagtgccacaagagcactatgtgagaattactggcttgtacccaacactcaacatctcagatgagttttctagcaatgttgcaaattatcaaaaggtcggcatgcaaaagtactctacactccaaggaccacctggtactggtaagagtcattttgccatcggacttgctctctattacccatctgctcgcatagtgtatacggcatgctctcatgcagctgttgatgccctatgtgaaaaggcattaaaatatttgcccatagataaatgtagtagaatcatacctgcgcgtgcgcgcgtagagtgttttgataaattcaaagtgaattcaacactagaacagtatgttttctgcactgtaaatgcattgccagaaacaactgctgacattgtagtctttgatgaaatctctatggctactaattatgacttgagtgttgtcaatgctagacttcgtgcaaaacactacgtctatattggcgatcctgctcaattaccagccccccgcacattgctgactaaaggcacactagaaccagaatattttaattcagtgtgcagacttatgaaaacaataggtccagacatgttccttggaacttgtcgccgttgtcctgctgaaattgttgacactgtgagtgctttagtttatgacaataagctaaaagcacacaaggataagtcagctcaatgcttcaaaatgttctacaaaggtgttattacacatgatgtttcatctgcaatcaacagacctcaaataggcgttgtaagagaatttcttacacgcaatcctgcttggagaaaagctgtttttatctcaccttataattcacagaacgctgtagcttcaaaaatcttaggattgcctacgcagactgttgattcatcacagggttctgaatatgactatgtcatattcacacaaactactgaaacagcacactcttgtaatgtcaaccgcttcaatgtggctatcacaagggcaaaaattggcattttgtgcataatgtctgatagagatctttatgacaaactgcaatttacaagtctagaaataccacgtcgcaatgtggctacattacaagcagaaaatgtaactggactttttaaggactgtagtaagatcattactggtcttcatcctacacaggcacctacacacctcagcgttgatataaagttcaagactgaaggattatgtgttgacataccaggcataccaaaggacatgacctaccgtagactcatctctatgatgggtttcaaaatgaattaccaagtcaatggttaccctaatatgtttatcacccgcgaagaagctattcgtcacgttcgtgcgtggattggctttgatgtagagggctgtcatgcaactagagatgctgtgggtactaacctacctctccagctaggattttctacaggtgttaacttagtagctgtaccgactggttatgttgacactgaaaataacacagaattcaccagagttaatgcaaaacctccaccaggtgaccagtttaaacatcttataccactcatgtataaaggcttgccctggaatgtagtgcgtattaagatagtacaaatgctcagtgatacactgaaaggattgtcagacagagtcgtgttcgtcctttgggcgcatggctttgagcttacatcaatgaagtactttgtcaagattggacctgaaagaacgtgttgtctgtgtgacaaacgtgcaacttgcttttctacttcatcagatacttatgcctgctggaatcattctgtgggttttgactatgtctataacccatttatgattgatgttcagcagtggggctttacgggtaaccttcagagtaaccatgaccaacattgccaggtacatggaaatgcacatgtggctagttgtgatgctatcatgactagatgtttagcagtccatgagtgctttgttaagcgcgttgattggtctgttgaataccctattataggagatgaactgagggttaattctgcttgcagaaaagtacaacacatggttgtgaagtctgcattgcttgctgataagtttccagttcttcatgacattggaaatccaaaggctatcaagtgtgtgcctcaggctgaagtagaatggaagttctacgatgctcagccatgtagtgacaaagcttacaaaatagaggaactcttctattcttatgctacacatcacgataaattcactgatggtgtttgtttgttttggaattgtaacgttgatcgttacccagccaatgcaattgtgtgtaggtttgacacaagagtcttgtcaaacttgaacttaccaggctgtgatggtggtagtttgtatgtgaataagcatgcattccacactccagctttcgataaaagtgcatttactaatttaaagcaattgcctttcttttactattctgatagtccttgtgagtctcatggcaaacaagtagtgtcggatattgattatgttccactcaaatctgctacgtgtattacacgatgcaatttaggtggtgctgtttgcagacaccatgcaaatgagtaccgacagtacttggatgcatataatatgatgatttctgctggatttagcctatggatttacaaacaatttgatacttataacctgtggaatacatttaccaggttacagagtttagaaaatgtggcttataatgttgttaataaaggacactttgatggacacgccggcgaagcacctgtttccatcattaataatgctgtttacacaaaggtagatggtattgatgtggagatctttgaaaataagacaacacttcctgttaatgttgcatttgagctttgggctaagcgtaacattaaaccagtgccagagattaagatactcaataatttgggtgttgatatcgctgctaatactgtaatctgggactacaaaagagaagccccagcacatgtatctacaataggtgtctgcacaatgactgacattgccaagaaacctactgagagtgcttgttcttcacttactgtcttgtttgatggtagagtggaaggacaggtagacctttttagaaacgcccgtaatggtgttttaataacagaaggttcagtcaaaggtctaacaccttcaaagggaccagcacaagctagcgtcaatggagtcacattaattggagaatcagtaaaaacacagtttaactactttaagaaagtagacggcattattcaacagttgcctgaaacctactttactcagagcagagacttagaggattttaagcccagatcacaaatggaaactgactttctcgagctcgctatggatgaattcatacagcgatataagctcgagggctatgccttcgaacacatcgtttatggagatttcagtcatggacaacttggcggtcttcatttaatgataggcttagccaagcgctcacaagattcaccacttaaattagaggattttatccctatggacagcacagtgaaaaattacttcataacagatgcgcaaacaggttcatcaaaatgtgtgtgttctgtgattgatcttttacttgatgactttgtcgagataataaagtcacaagatttgtcagtgatttcaaaagtggtcaaggttacaattgactatgctgaaatttcattcatgctttggtgtaaggatggacatgttgaaaccttctacccaaaactacaagcaagtcaagcgtggcaaccaggtgttgcgatgcctaacttgtacaagatgcaaagaatgcttcttgaaaagtgtgaccttcagaattatggtgaaaatgctgttataccaaaaggaataatgatgaatgtcgcaaagtatactcaactgtgtcaatacttaaatacacttactttagctgtaccctacaacatgagagttattcactttggtgctggctctgataaaggagttgcaccaggtacagctgtgctcagacaatggttgccaactggcacactacttgtcgattcagatcttaatgacttcgtctccgacgcagattctactttaattggagactgtgcaacagtacatacggctaataaatgggaccttattattagcgatatgtatgaccctaggaccaaacatgtgacaaaagagaatgactctaaagaagggtttttcacttatctgtgtggatttataaagcaaaaactagccctgggtggttctatagctgtaaagataacagagcattcttggaatgctgacctttacaagcttatgggccatttctcatggtggacagcttttgttacaaatgtaaatgcatcatcatcggaagcatttttaattggggctaactatcttggcaagccgaaggaacaaattgatggctataccatgcatgctaactacattttctggaggaacacaaatcctatccagttgtcttcctattcactctttgacatgagcaaatttcctcttaaattaagaggaactgctgtaatgtctcttaaggagaatcaaatcaatgatatgatttattctcttctggaaaaaggtaggcttatcattagagaaaacaacagagttgtggtttcaagtgatattcttgttaacaactaaacgaacatgtttattttcttattatttcttactctcactagtggtagtgaccttgaccggtgcaccacttttgatgatgttcaagctcctaattacactcaacatacttcatctatgaggggggtttactatcctgatgaaatttttagatcagacactctttatttaactcaggatttatttcttccattttattctaatgttacagggtttcatactattaatcatacgtttggcaaccctgtcataccttttaaggatggtatttattttgctgccacagagaaatcaaatgttgtccgtggttgggtttttggttctaccatgaacaacaagtcacagtcggtgattattattaacaattctactaatgttgttatacgagcatgtaactttgaattgtgtgacaaccctttctttgctgtttctaaacccatgggtacacagacacatactatgatattcgataatgcatttaattgcactttcgagtacatatctgatgccttttcgcttgatgtttcagaaaagtcaggtaattttaaacacttacgagagtttgtgtttaaaaataaagatgggtttctctatgtttataagggctatcaacctatagatgtagttcgtgatctaccttctggttttaacactttgaaacctatttttaagttgcctcttggtattaacattacaaattttagagccattcttacagccttttcacctgctcaagacatttggggcacgtcagctgcagcctattttgttggctatttaaagccaactacatttatgctcaagtatgatgaaaatggtacaatcacagatgctgttgattgttctcaaaatccacttgctgaactcaaatgctctgttaagagctttgagattgacaaaggaatttaccagacctctaatttcagggttgttccctcaggagatgttgtgagattccctaatattacaaacttgtgtccttttggagaggtttttaatgctactaaattcccttctgtctatgcatgggagagaaaaaaaatttctaattgtgttgctgattactctgtgctctacaactcaacatttttttcaacctttaagtgctatggcgtttctgccactaagttgaatgatctttgcttctccaatgtctatgcagattcttttgtagtcaagggagatgatgtaagacaaatagcgccaggacaaactggtgttattgctgattataattataaattgccagatgatttcatgggttgtgtccttgcttggaatactaggaacattgatgctacttcaactggtaattataattataaatataggtatcttagacatggcaagcttaggccctttgagagagacatatctaatgtgcctttctcccctgatggcaaaccttgcaccccacctgctcttaattgttattggccattaaatgattatggtttttacaccactactggcattggctaccaaccttacagagttgtagtactttcttttgaacttttaaatgcaccggccacggtttgtggaccaaaattatccactgaccttattaagaaccagtgtgtcaattttaattttaatggactcactggtactggtgtgttaactccttcttcaaagagatttcaaccatttcaacaatttggccgtgatgtttctgatttcactgattccgttcgagatcctaaaacatctgaaatattagacatttcaccttgcgcttttgggggtgtaagtgtaattacacctggaacaaatgcttcatctgaagttgctgttctatatcaagatgttaactgcactgatgtttctacagcaattcatgcagatcaactcacaccagcttggcgcatatattctactggaaacaatgtattccagactcaagcaggctgtcttataggagctgagcatgtcgacacttcttatgagtgcgacattcctattggagctggcatttgtgctagttaccatacagtttctttattacgtagtactagccaaaaatctattgtggcttatactatgtctttaggtgctgatagttcaattgcttactctaataacaccattgctatacctactaacttttcaattagcattactacagaagtaatgcctgtttctatggctaaaacctccgtagattgtaatatgtacatctgcggagattctactgaatgtgctaatttgcttctccaatatggtagcttttgcacacaactaaatcgtgcactctcaggtattgctgctgaacaggatcgcaacacacgtgaagtgttcgctcaagtcaaacaaatgtacaaaaccccaactttgaaatattttggtggttttaatttttcacaaatattacctgaccctctaaagccaactaagaggtcttttattgaggacttgctctttaataaggtgacactcgctgatgctggcttcatgaagcaatatggcgaatgcctaggtgatattaatgctagagatctcatttgtgcgcagaagttcaatggacttacagtgttgccacctctgctcactgatgatatgattgctgcctacactgctgctctagttagtggtactgccactgctggatggacatttggtgctggcgctgctcttcaaataccttttgctatgcaaatggcatataggttcaatggcattggagttacccaaaatgttctctatgagaaccaaaaacaaatcgccaaccaatttaacaaggcgattagtcaaattcaagaatcacttacaacaacatcaactgcattgggcaagctgcaagacgttgttaaccagaatgctcaagcattaaacacacttgttaaacaacttagctctaattttggtgcaatttcaagtgtgctaaatgatatcctttcgcgacttgataaagtcgaggcggaggtacaaattgacaggttaattacaggcagacttcaaagccttcaaacctatgtaacacaacaactaatcagggctgctgaaatcagggcttctgctaatcttgctgctactaaaatgtctgagtgtgttcttggacaatcaaaaagagttgacttttgtggaaagggctaccaccttatgtccttcccacaagcagccccgcatggtgttgtcttcctacatgtcacgtatgtgccatcccaggagaggaacttcaccacagcgccagcaatttgtcatgaaggcaaagcatacttccctcgtgaaggtgtttttgtgtttaatggcacttcttggtttattacacagaggaacttcttttctccacaaataattactacagacaatacatttgtctcaggaaattgtgatgtcgttattggcatcattaacaacacagtttatgatcctctgcaacctgagcttgactcattcaaagaagagctggacaagtacttcaaaaatcatacatcaccagatgttgatcttggcgacatttcaggcattaacgcttctgtcgtcaacattcaaaaagaaattgaccgcctcaatgaggtcgctaaaaatttaaatgaatcactcattgaccttcaagaattgggaaaatatgagcaatatattaaatggccttggtatgtttggctcggcttcattgctggactaattgccatcgtcatggttacaatcttgctttgttgcatgactagttgttgcagttgcctcaagggtgcatgctcttgtggttcttgctgcaagtttgatgaggatgactctgagccagttctcaagggtgtcaaattacattacacataaacgaacttatggatttgtttatgagattttttactcttagatcaattactgcacagccagtaaaaattgacaatgcttctcctgcaagtactgttcatgctacagcaacgataccgctacaagcctcactccctttcggatggcttgttattggcgttgcatttcttgctgtttttcagagcgctaccaaaataattgcgctcaataaaagatggcagctagccctttataagggcttccagttcatttgcaatttactgctgctatttgttaccatctattcacatcttttgcttgtcgctgcaggtatggaggcgcaatttttgtacctctatgccttgatatattttctacaatgcatcaacgcatgtagaattattatgagatgttggctttgttggaagtgcaaatccaagaacccattactttatgatgccaactactttgtttgctggcacacacataactatgactactgtataccatataacagtgtcacagatacaattgtcgttactgaaggtgacggcatttcaacaccaaaactcaaagaagactaccaaattggtggttattctgaggataggcactcaggtgttaaagactatgtcgttgtacatggctatttcaccgaagtttactaccagcttgagtctacacaaattactacagacactggtattgaaaatgctacattcttcatctttaacaagcttgttaaagacccaccgaatgtgcaaatacacacaatcgacggctcttcaggagttgctaatccagcaatggatccaatttatgatgagccgacgacgactactagcgtgcctttgtaagcacaagaaagtgagtacgaacttatgtactcattcgtttcggaagaaacaggtacgttaatagttaatagcgtacttctttttcttgctttcgtggtattcttgctagtcacactagccatccttactgcgcttcgattgtgtgcgtactgctgcaatattgttaacgtgagtttagtaaaaccaacggtttacgtctactcgcgtgttaaaaatctgaactcttctgaaggagttcctgatcttctggtctaaacgaactaactattattattattctgtttggaactttaacattgcttatcatggcagacaacggtactattaccgttgaggagcttaaacaactcctggaacaatggaacctagtaataggtttcctattcctagcctggattatgttactacaatttgcctattctaatcggaacaggtttttgtacataataaagcttgttttcctctggctcttgtggccagtaacacttgcttgttttgtgcttgctgctgtctacagaattaattgggtgactggcgggattgcgattgcaatggcttgtattgtaggcttgatgtggcttagctacttcgttgcttccttcaggctgtttgctcgtacccgctcaatgtggtcattcaacccagaaacaaacattcttctcaatgtgcctctccgggggacaattgtgaccagaccgctcatggaaagtgaacttgtcattggtgctgtgatcattcgtggtcacttgcgaatggccggacactccctagggcgctgtgacattaaggacctgccaaaagagatcactgtggctacatcacgaacgctttcttattacaaattaggagcgtcgcagcgtgtaggcactgattcaggttttgctgcatacaaccgctaccgtattggaaactataaattaaatacagaccacgccggtagcaacgacaatattgctttgctagtacagtaagtgacaacagatgtttcatcttgttgacttccaggttacaatagcagagatattgattatcattatgaggactttcaggattgctatttggaatcttgacgttataataagttcaatagtgagacaattatttaagcctctaactaagaagaattattcggagttagatgatgaagaacctatggagttagattatccataaaacgaacatgaaaattattctcttcctgacattgattgtatttacatcttgcgagctatatcactatcaggagtgtgttagaggtacgactgtactactaaaagaaccttgcccatcaggaacatacgagggcaattcaccatttcaccctcttgctgacaataaatttgcactaacttgcactagcacacactttgcttttgcttgtgctgacggtactcgacatacctatcagctgcgtgcaagatcagtttcaccaaaacttttcatcagacaagaggaggttcaacaagagctctactcgccactttttctcattgttgctgctctagtatttttaatactttgcttcaccattaagagaaagacagaatgaatgagctcactttaattgacttctatttgtgctttttagcctttctgctattccttgttttaataatgcttattatattttggttttcactcgaaatccaggatctagaagaaccttgtaccaaagtctaaacgaacatgaaacttctcattgttttgacttgtatttctctatgcagttgcatatgcactgtagtacagcgctgtgcatctaataaacctcatgtgcttgaagatccttgtaaggtacaacactaggggtaatacttatagcactgcttggctttgtgctctaggaaaggttttaccttttcatagatggcacactatggttcaaacatgcacacctaatgttactatcaactgtcaagatccagctggtggtgcgcttatagctaggtgttggtaccttcatgaaggtcaccaaactgctgcatttagagacgtacttgttgttttaaataaacgaacaaattaaaatgtctgataatggaccccaatcaaaccaacgtagtgccccccgcattacatttggtggacccacagattcaactgacaataaccagaatggaggacgcaatggggcaaggccaaaacagcgccgaccccaaggtttacccaataatactgcgtcttggttcacagctctcactcagcatggcaaggaggaacttagattccctcgaggccagggcgttccaatcaacaccaatagtggtccagatgaccaaattggctactaccgaagagctacccgacgagttcgtggtggtgacggcaaaatgaaagagctcagccccagatggtacttctattacctaggaactggcccagaagcttcacttccctacggcgctaacaaagaaggcatcgtatgggttgcaactgagggagccttgaatacacccaaagaccacattggcacccgcaatcctaataacaatgctgccaccgtgctacaacttcctcaaggaacaacattgccaaaaggcttctacgcagagggaagcagaggcggcagtcaagcctcttctcgctcctcatcacgtagtcgcggtaattcaagaaattcaactcctggcagcagtaggggaaattctcctgctcgaatggctagcggaggtggtgaaactgccctcgcgctattgctgctagacagattgaaccagcttgagagcaaagtttctggtaaaggccaacaacaacaaggccaaactgtcactaagaaatctgctgctgaggcatctaaaaagcctcgccaaaaacgtactgccacaaaacagtacaacgtcactcaagcatttgggagacgtggtccagaacaaacccaaggaaatttcggggaccaagacctaatcagacaaggaactgattacaaacattggccgcaaattgcacaatttgctccaagtgcctctgcattctttggaatgtcacgcattggcatggaagtcacaccttcgggaacatggctgacttatcatggagccattaaattggatgacaaagatccacaattcaaagacaacgtcatactgctgaacaagcacattgacgcatacaaaacattcccaccaacagagcctaaaaaggacaaaaagaaaaagactgatgaagctcagcctttgccgcagagacaaaagaagcagcccactgtgactcttcttcctgcggctgacatggatgatttctccagacaacttcaaaattccatgagtggagcttctgctgattcaactcaggcataaacactcatgatgaccacacaaggcagatgggctatgtaaacgttttcgcaattccgtttacgatacatagtctactcttgtgcagaatgaattctcgtaactaaacagcacaagtaggtttagttaactttaatctcacatagcaatctttaatcaatgtgtaacattagggaggacttgaaagagccaccacattttcatcgaggccacgcggagtacgatcgagggtacagtgaataatgctagggagagctgcctatatggaagagccctaatgtgtaaaattaattttagtagtgctatccccatgtgattttaatagcttcttaggagaatgacaaaaaaaaaaaaaaaaaaaaaaaa

SEQ ID NO: 74 - DNA, 29736 bp, Coronavirus
ctacccaggaaaagccaaccaacctcgatctcttgtagatctgttctctaaacgaactttaaaatctgtgtagctgtcgctcggctgcatgcctagtgcacctacgcagtataaacaataataaattttactgtcgttgacaagaaacgagtaactcgtccctcttctgcagactgcttacggtttcgtccgtgttgcagtcgatcatcagcatacctaggtttcgtccgggtgtgaccgaaaggtaagatggagagccttgttcttggtgtcaacgagaaaacacacgtccaactcagtttgcctgtccttcaggttagagacgtgctagtgcgtggcttcggggactctgtggaagaggccctatcggaggcacgtgaacacctcaaaaatggcacttgtggtctagtagagctggaaaaaggcgtactgccccagcttgaacagccctatgtgttcattaaacgttctgatgccttaagcaccaatcacggccacaaggtcgttgagctggttgcagaaatggacggcattcagtacggtcgtagcggtataacactgggagtactcgtgccacatgtgggcgaaaccccaattgcataccgcaatgttcttcttcgtaagaacggtaataagggagccggtggtcatagctatggcatcgatctaaagtcttatgacttaggtgacgagcttggcactgatcccattgaagattatgaacaaaactggaacactaagcatggcagtggtgcactccgtgaactcactcgtgagctcaatggaggtgcagtcactcgctatgtcgacaacaatttctgtggcccagatgggtaccctcttgattgcatcaaagattttctcgcacgcgcgggcaagtcaatgtgcactctttccgaacaacttgattacatcgagtcgaagagaggtgtctactgctgccgtgaccatgagcatgaaattgcctggttcactgagcgctctgataagagctacgagcaccagacacccttcgaaattaagagtgccaagaaatttgacactttcaaaggggaatgcccaaagtttgtgtttcctcttaactcaaaagtcaaagtcattcaaccacgtgttgaaaagaaaaagactgagggtttcatggggcgtatacgctctgtgtaccctgttgcatctccacaggagtgtaacaatatgcacttgtctaccttgatgaaatgtaatcattgcgatgaagtttcatggcagacgtgcgactttctgaaagccacttgtgaacattgtggcactgaaaatttagttattgaaggacctactacatgtgggtacctacctactaatgctgtagtgaaaatgccatgtcctgcctgtcaagacccagagattggacctgagcatagtgttgcagattatcacaaccactcaaacattgaaactcgactccgcaagggaggtaggactagatgttttggaggctgtgtgtttgcctatgttggctgctataataagcgtgcctactgggttcctcgtgctagtgctgatattggctcaggccatactggcattactggtgacaatgtggagaccttgaatgaggatctccttgagatactgagtcgtgaacgtgttaacattaacattgttggcgattttcatttgaatgaagaggttgccatcattttggcatctttctctgcttctacaagtgcctttattgacactataaagagtcttgattacaagtctttcaaaaccattgttgagtcctgcggtaactataaagttaccaagggaaagcccgtaaaaggtgcttggaacattggacaacagagatcagttttaacaccactgtgtggttttccctcacaggctgctggtgttatcagatcaatttttgcgcgcacacttgatgcagcaaaccactcaattcctgatttgcaaagagcagctgtcaccatacttgatggtatttctgaacagtcattacgtcttgtcgacgccatggtttatacttcagacctgctcaccaacagtgtcattattatggcatatgtaactggtggtcttgtacaacagacttctcagtggttgtctaatcttttgggcactactgttgaaaaactcaggcctatctttgaatggattgaggcgaaacttagtgcaggagttgaatttctcaaggatgcttgggagattctcaaatttctcattacaggtgtttttgacatcgtcaagggtcaaatacaggttgcttcagataacatcaaggattgtgtaaaatgcttcattgatgttgttaacaaggcactcgaaatgtgcattgatcaagtcactatcgctggcgcaaagttgcgatcactcaacttaggtgaagtcttcatcgctcaaagcaagggactttaccgtcagtgtatacgtggcaaggagcagctgcaactactcatgcctcttaaggcaccaaaagaagtaacctttcttgaaggtgattcacatgacacagtacttacctctgaggaggttgttctcaagaacggtgaactcgaagcactcgagacgcccgttgatagcttcacaaatggagctatcgttggcacaccagtctgtgtaaatggcctcatgctcttagagattaaggacaaagaacaatactgcgcattgtctcctggtttactggctacaaacaatgtctttcgcttaaaagggggtgcaccaattaaaggtgtaacctttggagaagatactgtttgggaagttcaaggttacaagaatgtgagaatcacatttgagcttgatgaacgtgttgacaaagtgcttaatgaaaagtgctctgtctacactgttgaatccggtaccgaagttactgagtttgcatgtgttgtagcagaggctgttgtgaagactttacaaccagtttctgatctccttaccaacatgggtattgatcttgatgagtggagtgtagctacattctacttatttgatgatgctggtgaagaaaacttttcatcacgtatgtattgttccttttaccctccagatgaggaagaagaggacgatgcagagtgtgaggaagaagaaattgatgaaacctgtgaacatgagtacggtacagaggatgattatcaaggtctccctctggaatttggtgcctcagctgaaacagttcgagttgaggaagaagaagaggaagactggctggatgatactactgagcaatcagagattgagccagaaccagaacctacacctgaagaaccagttaatcagtttactggttatttaaaacttactgacaatgttgccattaaatgtgttgacatcgttaaggaggcacaaagtgctaatcctatggtgattgtaaatgctgctaacatacacctgaaacatggtggtggtgtagcaggtgcactcaacaaggcaaccaatggtgccatgcaaaaggagagtgatgattacattaagctaaatggccctcttacagtaggagggtcttgtttgctttctggacataatcttgctaagaagtgtctgcatgttgttggacctaacctaaatgcaggtgaggacatccagcttcttaaggcagcatatgaaaatttcaattcacaggacatcttacttgcaccattgttgtcagcaggcatatttggtgctaaaccacttcagtctttacaagtgtgcgtgcagacggttcgtacacaggtttatattgcagtcaatgacaaagctctttatgagcaggttgtcatggattatcttgataacctgaagcctagagtggaagcacctaaacaagaggagccaccaaacacagaagattccaaaactgaggagaaatctgtcgtacagaagcctgtcgatgtgaagccaaaaattaaggcctgcattgatgaggttaccacaacactggaagaaactaagtttcttaccaataagttactcttgtttgctgatatcaatggtaagctttaccatgattctcagaacatgcttagaggtgaagatatgtctttccttgagaaggatgcaccttacatggtaggtgatgttatcactagtggtgatatcacttgtgttgtaataccctccaaaaaggctggtggcactactgagatgctctcaagagctttgaagaaagtgccagttgatgagtatataaccacgtaccctggacaaggatgtgctggttatacacttgaggaagctaagactgctcttaagaaatgcaaatctgcattttatgtactaccttcagaagcacctaatgctaaggaagagattctaggaactgtatcctggaatttgagagaaatgcttgctcatgctgaagagacaagaaaattaatgcctatatgcatggatgttagagccataatggcaaccatccaacgtaagtataaaggaattaaaattcaagagggcatcgttgactatggtgtccgattcttcttttatactagtaaagagcctgtagcttctattattacgaagctgaactctctaaatgagccgcttgtcacaatgccaattggttatgtgacacatggttttaatcttgaagaggctgcgcgctgtatgcgttctcttaaagctcctgccgtagtgtcagtatcatcaccagatgctgttactacatataatggatacctcacttcgtcatcaaagacatctgaggagcactttgtagaaacagtttctttggctggctcttacagagattggtcctattcaggacagcgtacagagttaggtgttgaatttcttaagcgtggtgacaaaattgtgtaccacactctggagagccccgtcgagtttcatcttgacggtgaggttctttcacttgacaaactaaagagtctcttatccctgcgggaggttaagactataaaagtgttcacaactgtggacaacactaatctccacacacagcttgtggatatgtctatgacatatggacagcagtttggtccaacatacttggatggtgctgatgttacaaaaattaaacctcatgtaaatcatgagggtaagactttctttgtactacctagtgatgacacactacgtagtgaagctttcgagtactaccatactcttgatgagagttttcttggtaggtacatgtctgctttaaaccacacaaagaaatggaaatttcctcaagttggtggtttaacttcaattaaatgggctgataacaattgttatttgtctagtgttttattagcacttcaacagcttgaagtcaaattcaatgcaccagcacttcaagaggcttattatagagcccgtgctggtgatgctgctaacttttgtgcactcatactcgcttacagtaataaaactgttggcgagcttggtgatgtcagagaaactatgacccatcttctacagcatgctaatttggaatctgcaaagcgagttcttaatgtggtgtgtaaacattgtggtcagaaaactactaccttaacgggtgtagaagctgtgatgtatatgggtactctatcttatgataatcttaagacaggtgtttccattccatgtgtgtgtggtcgtgatgctacacaatatctagtacaacaagagtcttcttttgttatgatgtctgcaccacctgctgagtataaattacagcaaggtacattcttatgtgcgaatgagtacactggtaactatcagtgtggtcattacactcatataactgctaaggagaccctctatcgtattgacggagctcaccttacaaagatgtcagagtacaaaggaccagtgactgatgttttctacaaggaaacatcttacactacaaccatcaagcctgtgtcgtataaactcgatggagttacttacacagagattgaaccaaaattggatgggtattataaaaaggataatgcttactatacagagcagcctatagaccttgtaccaactcaaccattaccaaatgcgagttttgataatttcaaactcacatgttctaacacaaaatttgctgatgatttaaatcaaatgacaggcttcacaaagccagcttcacgagagctatctgtcacattcttcccagacttgaatggcgatgtagtggctattgactatagacactattcagcgagtttcaagaaaggtgctaaattactgcataagccaattgtttggcacattaaccaggctacaaccaagacaacgttcaaaccaaacacttggtgtttacgttgtctttggagtacaaagccagtagatacttcaaattcatttgaagttctggcagtagaagacacacaaggaatggacaatcttgcttgtgaaagtcaacaacccacctctgaagaagtagtggaaaatcctaccatacagaaggaagtcatagagtgtgacgtgaaaactaccgaagttgtaggcaatgtcatacttaaaccatcagatgaaggtgttaaagtaacacaagagttaggtcatgaggatcttatggctgcttatgtggaaaacacaagcattaccattaagaaacctaatgagctttcactagccttaggtttaaaaacaattgccactcatggtattgctgcaattaatagtgttccttggagtaaaattttggcttatgtcaaaccattcttaggacaagcagcaattacaacatcaaattgcgctaagagattagcacaacgtgtgtttaacaattatatgccttatgtgtttacattattgttccaattgtgtacttttactaaaagtaccaattctagaattagagcttcactacctacaactattgctaaaaatagtgttaagagtgttgctaaattatgtttggatgccggcattaattatgtgaagtcacccaaattttctaaattgttcacaatcgctatgtggctattgttgttaagtatttgcttaggttctctaatctgtgtaactgctgcttttggtgtactcttatctaattttggtgctccttcttattgtaatggcgttagagaattgtatcttaattcgtctaacgttactactatggatttctgtgaaggttcttttccttgcagcatttgtttaagtggattagactcccttgattcttatccagctcttgaaaccattcaggtgacgatttcatcgtacaagctagacttgacaattttaggtctggccgctgagtgggttttggcatatatgttgttcacaaaattcttttatttattaggtctttcagctataatgcaggtgttctttggctattttgctagtcatttcatcagcaattcttggctcatgtggtttatcattagtattgtacaaatggcacccgtttctgcaatggttaggatgtacatcttctttgcttctttctactacatatggaagagctatgttcatatcatggatggttgcacctcttcgacttgcatgatgtgctataagcgcaatcgtgccacacgcgttgagtgtacaactattgttaatggcatgaagagatctttctatgtctatgcaaatggaggccgtggcttctgcaagactcacaattggaattgtctcaattgtgacacattttgcactggtagtacattcattagtgatgaagttgctcgtgatttgtcactccagtttaaaagaccaatcaaccctactgaccagtcatcgtatattgttgatagtgttgctgtgaaaaatggcgcgcttcacctctactttgacaaggctggtcaaaagacctatgagagacatccgctctcccattttgtcaatttagacaatttgagagctaacaacactaaaggttcactgcctattaatgtcatagtttttgatggcaagtccaaatgcgacgagtctgcttctaagtctgcttctgtgtactacagtcagctgatgtgccaacctattctgttgcttgaccaagctcttgtatcagacgttggagatagtactgaagtttccgttaagatgtttgatgcttatgtcgacaccttttcagcaacttttagtgttcctatggaaaaacttaaggcacttgttgctacagctcacagcgagttagcaaagggtgtagctttagatggtgtcctttctacattcgtgtcagctgcccgacaaggtgttgttgataccgatgttgacacaaaggatgttattgaatgtctcaaactttcacatcactctgacttagaagtgacaggtgacagttgtaacaatttcatgctcacctataataaggttgaaaacatgacgcccagagatcttggcgcatgtattgactgtaatgcaaggcatatcaatgcccaagtagcaaaaagtcacaatgtttcactcatctggaatgtaaaagactacatgtctttatctgaacagctgcgtaaacaaattcgtagtgctgccaagaagaacaacataccttttagactaacttgtgctacaactagacaggttgtcaatgtcataactactaaaatctcactcaagggtggtaagattgttagtacttgttttaaacttatgcttaaggccacattattgtgcgttcttgctgcattggtttgttatatcgttatgccagtacatacattgtcaatccatgatggttacacaaatgaaatcattggttacaaagccattcaggatggtgtcactcgtgacatcatttctactgatgattgttttgcaaataaacatgctggttttgacgcatggtttagccagcgtggtggttcatacaaaaatgacaaaagctgccctgtagtagctgctatcattacaagagagattggtttcatagtgcctggcttaccgggtactgtgctgagagcaatcaatggtgacttcttgcattttctacctcgtgtttttagtgctgttggcaacatttgctacacaccttccaaactcattgagtatagtgattttgctacctctgcttgcgttcttgctgctgagtgtacaatttttaaggatgctatgggcaaacctgtgccatattgttatgacactaatttgctagagggttctatttcttatagtgagcttcgtccagacactcgttatgtgcttatggatggttccatcatacagtttcctaacacttacctggagggttctgttagagtagtaacaacttttgatgctgagtactgtagacatggtacatgcgaaaggtcagaagtaggtatttgcctatctaccagtggtagatgggttcttaataatgagcattacagagctctatcaggagttttctgtggtgttgatgcgatgaatctcatagctaacatctttactcctcttgtgcaacctgtgggtgctttagatgtgtctgcttcagtagtggctggtggtattattgccatattggtgacttgtgctgcctactactttatgaaattcagacgtgtttttggtgagtacaaccatgttgttgctgctaatgcacttttgtttttgatgtctttcactatactctgtctggtaccagcttacagctttctgccgggagtctactcagtcttttacttgtacttgacattctatttcaccaatgatgtttcattcttggctcaccttcaatggtttgccatgttttctcctattgtgcctttttggataacagcaatctatgtattctgtatttctctgaagcactgccattggttctttaacaactatcttaggaaaagagtcatgtttaatggagttacatttagtaccttcgaggaggctgctttgtgtacctttttgctcaacaaggaaatgtacctaaaattgcgtagcgagacactgttgccacttacacagtataacaggtatcttgctctatataacaagtacaagtatttcagtggagccttagatactaccagctatcgtgaagcagcttgctgccacttagcaaaggctctaaatgactttagcaactcaggtgctgatgttctctaccaaccaccacagacatcaatcacttctgctgttctgcagagtggttttaggaaaatggcattcccgtcaggcaaagttgaagggtgcatggtacaagtaacctgtggaactacaactcttaatggattgtggttggatgacacagtatactgtccaagacatgtcatttgcacagcagaagacatgcttaatcctaactatgaagatctgctcattcgcaaatccaaccatagctttcttgttcaggctggcaatgttcaacttcgtgttattggccattctatgcaaaattgtctgcttaggcttaaagttgatacttctaaccctaagacacccaagtataaatttgtccgtatccaacctggtcaaacattttcagttctagcatgctacaatggttcaccatctggtgtttatcagtgtgccatgagacctaatcataccattaaaggttctttccttaatggatcatgtggtagtgttggttttaacattgattatgattgcgtgtctttctgctatatgcatcatatggagcttccaacaggagtacacgctggtactgacttagaaggtaaattctatggtccatttgttgacagacaaactgcacaggctgcaggtacagacacaaccataacattaaatgttttggcatggctgtatgctgctgttatcaatggtgataggtggtttcttaatagattcaccactactttgaatgactttaaccttgtggcaatgaagtacaactatgaacctttgacacaagatcatgttgacatattgggacctctttctgctcaaacaggaattgccgtcttagatatgtgtgctgctttgaaagagctgctgcagaatggtatgaatggtcgtactatccttggtagcactattttagaagatgagtttacaccatttgatgttgttagacaatgctctggtgttaccttccaaggtaagttcaagaaaattgttaagggcactcatcattggatgcttttaactttcttgacatcactattgattcttgttcaaagtacacagtggtcactgtttttctttgtttacgagaatgctttcttgccatttactcttggtattatggcaattgctgcatgtgctatgctgcttgttaagcataagcacgcattcttgtgcttgtttctgttaccttctcttgcaacagttgcttactttaatatggtctacatgcctgctagctgggtgatgcgtatcatgacatggcttgaattggctgacactagcttgtctggttataggcttaaggattgtgttatgtatgcttcagctttagttttgcttattctcatgacagctcgcactgtttatgatgatgctgctagacgtgtttggacactgatgaatgtcattacacttgtttacaaagtctactatggtaatgctttagatcaagctatttccatgtgggccttagttatttctgtaacctctaactattctggtgtcgttacgactatcatgtttttagctagagctatagtgtttgtgtgtgttgagtattacccattgttatttattactggcaacaccttacagtgtatcatgcttgtttattgtttcttaggctattgttgctgctgctactttggccttttctgtttactcaaccgttacttcaggcttactcttggtgtttatgactacttggtctctacacaagaatttaggtatatgaactcccaggggcttttgcctcctaagagtagtattgatgctttcaagcttaacattaagttgttgggtattggaggtaaaccatgtatcaaggttgctactgtacagtctaaaatgtctgacgtaaagtgcacatctgtggtactgctctcggttcttcaacaacttagagtagagtcatcttctaaattgtgggcacaatgtgtacaactccacaatgatattcttcttgcaaaagacacaactgaagctttcgagaagatggtttctcttttgtctgttttgctatccatgcagggtgctgtagacattaataggttgtgcgaggaaatgctcgataaccgtgctactcttcaggctattgcttcagaatttagttctttaccatcatatgccgcttatgccactgcccaggaggcctatgagcaggctgtagctaatggtgattctgaagtcgttctcaaaaagttaaagaaatctttgaatgtggctaaatctgagtttgaccgtgatgctgccatgcaacgcaagttggaaaagatggcagatcaggctatgacccaaatgtacaaacaggcaagatctgaggacaagagggcaaaagtaactagtgctatgcaaacaatgctcttcactatgcttaggaagcttgataatgatgcacttaacaacattatcaacaatgcgcgtgatggttgtgttccactcaacatcataccattgactacagcagccaaactcatggttgttgtccctgattatggtacctacaagaacacttgtgatggtaacacctttacatatgcatctgcactctgggaaatccagcaagttgttgatgcggatagcaagattgttcaacttagtgaaattaacatggacaattcaccaaatttggcttggcctcttattgttacagctctaagagccaactcagctgttaaactacagaataatgaactgagtccagtagcactacgacagatgtcctgtgcggctggtaccacacaaacagcttgtactgatgacaatgcacttgcctactataacaattcgaagggaggtaggtttgtgctggcattactatcagaccaccaagatctcaaatgggctagattccctaagagtgatggtacaggtacaatttacacagaactggaaccaccttgtaggtttgttacagacacaccaaaagggcctaaagtgaaatacttgtacttcatcaaaggcttaaacaacctaaatagaggtatggtgctgggcagtttagctgctacagtacgtcttcaggctggaaatgctacagaagtacctgccaattcaactgtgctttccttctgtgcttttgcagtagaccctgctaaagcatataaggattacctagcaagtggaggacaaccaatcaccaactgtgtgaagatgttgtgtacacacactggtacaggacaggcaattactgtaacaccagaagctaacatggaccaagagtcctttggtggtgcttcatgttgtctgtattgtagatgccacattgaccatccaaatcctaaaggattctgtgacttgaaaggtaagtacgtccaaatacctaccacttgtgctaatgacccagtgggttttacacttagaaacacagtctgtaccgtctgcggaatgtggaaaggttatggctgtagttgtgaccaactccgcgaacccttgatgcagtctgcggatgcatcaacgtttttaaacgggtttgcggtgtaagtgcagcccgtcttacaccgtgcggcacaggcactagtactgatgtcgtctacagggcttttgatatttacaacgaaaaagttgctggttttgcaaagttcctaaaaactaattgctgtcgcttccaggagaaggatgaggaaggcaatttattagactcttactttgtagttaagaggcatactatgtctaactaccaacatgaagagactatttataacttggttaaagattgtccagcggttgctgtccatgactttttcaagtttagagtagatggtgacatggtaccacatatatcacgtcagcgtctaactaaatacacaatggctgatttagtctatgctctacgtcattttgatgagggtaattgtgatacattaaaagaaatactcgtcacatacaattgctgtgatgatgattatttcaataagaaggattggtatgacttcgtagagaatcctgacatcttacgcgtatatgctaacttaggtgagcgtgtacgccaatcattattaaagactgtacaattctgcgatgctatgcgtgatgcaggcattgtaggcgtactgacattagataatcaggatcttaatgggaactggtacgatttcggtgatttcgtacaagtagcaccaggctgcggagttcctattgtggattcatattactcattgctgatgcccatcctcactttgactagggcattggctgctgagtcccatatggatgctgatctcgcaaaaccacttattaagtgggatttgctgaaatatgattttacggaagagagactttgtctcttcgaccgttattttaaatattgggaccagacataccatcccaattgtattaactgtttggatgataggtgtatccttcattgtgcaaactttaatgtgttattttctactgtgtttccacctacaagttttggaccactagtaagaaaaatatttgtagatggtgttccttttgttgtttcaactggataccattttcgtgagttaggagtcgtacataatcaggatgtaaacttacatagctcgcgtctcagtttcaaggaacttttagtgtatgctgctgatccagctatgcatgcagcttctggcaatttattgctagataaacgcactacatgcttttcagtagctgcactaacaaacaatgttgcttttcaaactgtcaaacccggtaattttaataaagacttttatgactttgctgtgtctaaaggtttctttaaggaaggaagttctgttgaactaaaacacttcttctttgctcaggatggcaacgctgctatcagtgattatgactattatcgttataatctgccaacaatgtgtgatatcagacaactcctattcgtagttgaagttgttgataaatactttgattgttacgatggtggctgtattaatgccaaccaagtaatcgttaacaatctggataaatcagctggtttcccatttaataaatggggtaaggctagactttattatgactcaatgagttatgaggatcaagatgcacttttcgcgtatactaagcgtaatgtcatccctactataactcaaatgaatcttaagtatgccattagtgcaaagaatagagctcgcaccgtagctggtgtctctatctgtagtactatgacaaatagacagtttcatcagaaattattgaagtcaatagccgccactagaggagctactgtggtaattggaacaagcaagttttacggtggctggcataatatgttaaaaactgtttacagtgatgtagaaactccacaccttatgggttgggattatccaaaatgtgacagagccatgcctaacatgcttaggataatggcctctcttgttcttgctcgcaaacataacacttgctgtaacttatcacaccgtttctacaggttagctaacgagtgtgcgcaagtattaagtgagatggtcatgtgtggcggctcactatatgttaaaccaggtggaacatcatccggtgatgctacaactgcttatgctaatagtgtctttaacatttgtcaagctgttacagccaatgtaaatgcacttctttcaactgatggtaataagatagctgacaagtatgtccgcaatctacaacacaggctctatgagtgtctctatagaaatagggatgttgatcatgaattcgtggatgagttttacgcttacctgcgtaaacatttctccatgatgattctttctgatgatgccgttgtgtgctataacagtaactatgcggctcaaggtttagtagctagcattaagaactttaaggcagttctttattatcaaaataatgtgttcatgtctgaggcaaaatgttggactgagactgaccttactaaaggacctcacgaattttgctcacagcatacaatgctagttaaacaaggagatgattacgtgtacctgccttacccagatccatcaagaatattaggcgcaggctgttttgtcgatgatattgtcaaaacagatggtacacttatgattgaaaggttcgtgtcactggctattgatgcttacccacttacaaaacatcctaatcaggagtatgctgatgtctttcacttgtatttacaatacattagaaagttacatgatgagcttactggccacatgttggacatgtattccgtaatgctaactaatgataacacctcacggtactgggaacctgagttttatgaggctatgtacacaccacatacagtcttgcaggctgtaggtgcttgtgtattgtgcaattcacagacttcacttcgttgcggtgcctgtattaggagaccattcctatgttgcaagtgctgctatgaccatgtcatttcaacatcacacaaattagtgttgtctgttaatccctatgtttgcaatgccccaggttgtgatgtcactgatgtgacacaactgtatctaggaggtatgagctattattgcaagtcacataagcctcccattagttttccattatgtgctaatggtcaggtttttggtttatacaaaaacacatgtgtaggcagtgacaatgtcactgacttcaatgcgatagcaacatgtgattggactaatgctggcgattacatacttgccaacacttgtactgagagactcaagcttttcgcagcagaaacgctcaaagccactgaggaaacatttaagctgtcatatggtattgccactgtacgcgaagtactctctgacagagaattgcatctttcatgggaggttggaaaacctagaccaccattgaacagaaactatgtctttactggttaccgtgtaactaaaaatagtaaagtacagattggagagtacacctttgaaaaaggtgactatggtgatgctgttgtgtacagaggtactacgacatacaagttgaatgttggtgattactttgtgttgacatctcacactgtaatgccacttagtgcacctactctagtgccacaagagcactatgtgagaattactggcttgtacccaacactcaacatctcagatgagttttctagcaatgttgcaaattatcaaaaggtcggcatgcaaaagtactctacactccaaggaccacctggtactggtaagagtcattttgccatcggacttgctctctattacccatctgctcgcatagtgtatacggcatgctctcatgcagctgttgatgccctatgtgaaaaggcattaaaatatttgcccatagataaatgtagtagaatcatacctgcgcgtgcgcgcgtagagtgttttgataaattcaaagtgaattcaacactagaacagtatgttttctgcactgtaaatgcattgccagaaacaactgctgacattgtagtctttgatgaaatctctatggctactaattatgacttgagtgttgtcaatgctagacttcgtgcaaaacactacgtctatattggcgatcctgctcaattaccagccccccgcacattgctgactaaaggcacactagaaccagaatattttaattcagtgtgcagacttatgaaaacaataggtccagacatgttccttggaacttgtcgccgttgtcctgctgaaattgttgacactgtgagtgctttagtttatgacaataagctaaaagcacacaaggataagtcagctcaatgcttcaaaatgttctacaaaggtgttattacacatgatgtttcatctgcaatcaacagacctcaaataggcgttgtaagagaatttcttacacgcaatcctgcttggagaaaagctgtttttatctcaccttataattcacagaacgctgtagcttcaaaaatcttaggattgcctacgcagactgttgattcatcacagggttctgaatatgactatgtcatattcacacaaactactgaaacagcacactcttgtaatgtcaaccgcttcaatgtggctatcacaagggcaaaaattggcattttgtgcataatgtctgatagagatctttatgacaaactgcaatttacaagtctagaaataccacgtcgcaatgtggctacattacaagcagaaaatgtaactggactttttaaggactgtagtaagatcattactggtcttcatcctacacaggcacctacacacctcagcgttgatataaagttcaagactgaaggattatgtgttgacataccaggcataccaaaggacatgacctaccgtagactcatctctatgatgggtttcaaaatgaattaccaagtcaatggttaccctaatatgtttatcacccgcgaagaagctattcgtcacgttcgtgcgtggattggctttgatgtagagggctgtcatgcaactagagatgctgtgggtactaacctacctctccagctaggattttctacaggtgttaacttagtagctgtaccgactggttatgttgacactgaaaataacacagaattcaccagagttaatgcaaaacctccaccaggtgaccagtttaaacatcttataccactcatgtataaaggcttgccctggaatgtagtgcgtattaagatagtacaaatgctcagtgatacactgaaaggattgtcagacagagtcgtgttcgtcctttgggcgcatggctttgagcttacatcaatgaagtactttgtcaagattggacctgaaagaacgtgttgtctgtgtgacaaacgtgcaacttgcttttctacttcatcagatacttatgcctgctggaatcattctgtgggttttgactatgtctataacccatttatgattgatgttcagcagtggggctttacgggtaaccttcagagtaaccatgaccaacattgccaggtacatggaaatgcacatgtggctagttgtgatgctatcatgactagatgtttagcagtccatgagtgctttgttaagcgcgttgattggtctgttgaataccctattataggagatgaactgagggttaattctgcttgcagaaaagtacaacacatggttgtgaagtctgcattgcttgctgataagtttccagttcttcatgacattggaaatccaaaggctatcaagtgtgtgcctcaggctgaagtagaatggaagttctacgatgctcagccatgtagtgacaaagcttacaaaatagaggaactcttctattcttatgctacacatcacgataaattcactgatggtgtttgtttgttttggaattgtaacgttgatcgttacccagccaatgcaattgtgtgtaggtttgacacaagagtcttgtcaaacttgaacttaccaggctgtgatggtggtagtttgtatgtgaataagcatgcattccacactccagctttcgataaaagtgcatttactaatttaaagcaattgcctttcttttactattctgatagtccttgtgagtctcatggcaaacaagtagtgtcggatattgattatgttccactcaaatctgctacgtgtattacacgatgcaatttaggtggtgctgtttgcagacaccatgcaaatgagtaccgacagtacttggatgcatataatatgatgatttctgctggatttagcctatggatttacaaacaatttgatacttataacctgtggaatacatttaccaggttacagagtttagaaaatgtggcttataatgttgttaataaaggacactttgatggacacgccggcgaagcacctgtttccatcattaataatgctgtttacacaaaggtagatggtattgatgtggagatctttgaaaataagacaacacttcctgttaatgttgcatttgagctttgggctaagcgtaacattaaaccagtgccagagattaagatactcaataatttgggtgttgatatcgctgctaatactgtaatctgggactacaaaagagaagccccagcacatgtatctacaataggtgtctgcacaatgactgacattgccaagaaacctactgagagtgcttgttcttcacttactgtcttgtttgatggtagagtggaaggacaggtagacctttttagaaacgcccgtaatggtgttttaataacagaaggttcagtcaaaggtctaacaccttcaaagggaccagcacaagctagcgtcaatggagtcacattaattggagaatcagtaaaaacacagtttaactactttaagaaagtagacggcattattcaacagttgcctgaaacctactttactcagagcagagacttagaggattttaagcccagatcacaaatggaaactgactttctcgagctcgctatggatgaattcatacagcgatataagctcgagggctatgccttcgaacacatcgtttatggagatttcagtcatggacaacttggcggtcttcatttaatgataggcttagccaagcgctcacaagattcaccacttaaattagaggattttatccctatggacagcacagtgaaaaattacttcataacagatgcgcaaacaggttcatcaaaatgtgtgtgttctgtgattgatcttttacttgatgactttgtcgagataataaagtcacaagatttgtcagtgatttcaaaagtggtcaaggttacaattgactatgctgaaatttcattcatgctttggtgtaaggatggacatgttgaaaccttctacccaaaactacaagcaagtcaagcgtggcaaccaggtgttgcgatgcctaacttgtacaagatgcaaagaatgcttcttgaaaagtgtgaccttcagaattatggtgaaaatgctgttataccaaaaggaataatgatgaatgtcgcaaagtatactcaactgtgtcaatacttaaatacacttactttagctgtaccctacaacatgagagttattcactttggtgctggctctgataaaggagttgcaccaggtacagctgtgctcagacaatggttgccaactggcacactacttgtcgattcagatcttaatgacttcgtctccgacgcagattctactttaattggagactgtgcaacagtacatacggctaataaatgggaccttattattagcgatatgtatgaccctaggaccaaacatgtgacaaaagagaatgactctaaagaagggtttttcacttatctgtgtggatttataaagcaaaaactagccctgggtggttctatagctgtaaagataacagagcattcttggaatgctgacctttacaagcttatgggccatttctcatggtggacagcttttgttacaaatgtaaatgcatcatcatcggaagcatttttaattggggctaactatcttggcaagccgaaggaacaaattgatggctataccatgcatgctaactacattttctggaggaacacaaatcctatccagttgtcttcctattcactctttgacatgagcaaatttcctcttaaattaagaggaactgctgtaatgtctcttaaggagaatcaaatcaatgatatgatttattctcttctggaaaaaggtaggcttatcattagagaaaacaacagagttgtggtttcaagtgatattcttgttaacaactaaacgaacatgtttattttcttattatttcttactctcactagtggtagtgaccttgaccggtgcaccacttttgatgatgttcaagctcctaattacactcaacatacttcatctatgaggggggtttactatcctgatgaaatttttagatcagacactctttatttaactcaggatttatttcttccattttattctaatgttacagggtttcatactattaatcatacgtttggcaaccctgtcataccttttaaggatggtatttattttgctgccacagagaaatcaaatgttgtccgtggttgggtttttggttctaccatgaacaacaagtcacagtcggtgattattattaacaattctactaatgttgttatacgagcatgtaactttgaattgtgtgacaaccctttctttgctgtttctaaacccatgggtacacagacacatactatgatattcgataatgcatttaattgcactttcgagtacatatctgatgccttttcgcttgatgtttcagaaaagtcaggtaattttaaacacttacgagagtttgtgtttaaaaataaagatgggtttctctatgtttataagggctatcaacctatagatgtagttcgtgatctaccttctggttttaacactttgaaacctatttttaagttgcctcttggtattaacattacaaattttagagccattcttacagccttttcacctgctcaagacatttggggcacgtcagctgcagcctattttgttggctatttaaagccaactacatttatgctcaagtatgatgaaaatggtacaatcacagatgctgttgattgttctcaaaatccacttgctgaactcaaatgctctgttaagagctttgagattgacaaaggaatttaccagacctctaatttcagggttgttccctcaggagatgttgtgagattccctaatattacaaacttgtgtccttttggagaggtttttaatgctactaaattcccttctgtctatgcatgggagagaaaaaaaatttctaattgtgttgctgattactctgtgctctacaactcaacatttttttcaacctttaagtgctatggcgtttctgccactaagttgaatgatctttgcttctccaatgtctatgcagattcttttgtagtcaagggagatgatgtaagacaaatagcgccaggacaaactggtgttattgctgattataattataaattgccagatgatttcatgggttgtgtccttgcttggaatactaggaacattgatgctacttcaactggtaattataattataaatataggtatcttagacatggcaagcttaggccctttgagagagacatatctaatgtgcctttctcccctgatggcaaaccttgcaccccacctgctcttaattgttattggccattaaatgattatggtttttacaccactactggcattggctaccaaccttacagagttgtagtactttcttttgaacttttaaatgcaccggccacggtttgtggaccaaaattatccactgaccttattaagaaccagtgtgtcaattttaattttaatggactcactggtactggtgtgttaactccttcttcaaagagatttcaaccatttcaacaatttggccgtgatgtttctgatttcactgattccgttcgagatcctaaaacatctgaaatattagacatttcaccttgcgcttttgggggtgtaagtgtaattacacctggaacaaatgcttcatctgaagttgctgttctatatcaagatgttaactgcactgatgtttctacagcaattcatgcagatcaactcacaccagcttggcgcatatattctactggaaacaatgtattccagactcaagcaggctgtcttataggagctgagcatgtcgacacttcttatgagtgcgacattcctattggagctggcatttgtgctagttaccatacagtttctttattacgtagtactagccaaaaatctattgtggcttatactatgtctttaggtgctgatagttcaattgcttactctaataacaccattgctatacctactaacttttcaattagcattactacagaagtaatgcctgtttctatggctaaaacctccgtagattgtaatatgtacatctgcggagattctactgaatgtgctaatttgcttctccaatatggtagcttttgcacacaactaaatcgtgcactctcaggtattgctgctgaacaggatcgcaacacacgtgaagtgttcgctcaagtcaaacaaatgtacaaaaccccaactttgaaatattttggtggttttaatttttcacaaatattacctgaccctctaaagccaactaagaggtcttttattgaggacttgctctttaataaggtgacactcgctgatgctggcttcatgaagcaatatggcgaatgcctaggtgatattaatgctagagatctcatttgtgcgcagaagttcaatggacttacagtgttgccacctctgctcactgatgatatgattgctgcctacactgctgctctagttagtggtactgccactgctggatggacatttggtgctggcgctgctcttcaaataccttttgctatgcaaatggcatataggttcaatggcattggagttacccaaaatgttctctatgagaaccaaaaacaaatcgccaaccaatttaacaaggcgattagtcaaattcaagaatcacttacaacaacatcaactgcattgggcaagctgcaagacgttgttaaccagaatgctcaagcattaaacacacttgttaaacaacttagctctaattttggtgcaatttcaagtgtgctaaatgatatcctttcgcgacttgataaagtcgaggcggaggtacaaattgacaggttaattacaggcagacttcaaagccttcaaacctatgtaacacaacaactaatcagggctgctgaaatcagggcttctgctaatcttgctgctactaaaatgtctgagtgtgttcttggacaatcaaaaagagttgacttttgtggaaagggctaccaccttatgtccttcccacaagcagccccgcatggtgttgtcttcctacatgtcacgtatgtgccatcccaggagaggaacttcaccacagcgccagcaatttgtcatgaaggcaaagcatacttccctcgtgaaggtgtttttgtgtttaatggcacttcttggtttattacacagaggaacttcttttctccacaaataattactacagacaatacatttgtctcaggaaattgtgatgtcgttattggcatcattaacaacacagtttatgatcctctgcaacctgagcttgactcattcaaagaagagctggacaagtacttcaaaaatcatacatcaccagatgttgatcttggcgacatttcaggcattaacgcttctgtcgtcaacattcaaaaagaaattgaccgcctcaatgaggtcgctaaaaatttaaatgaatcactcattgaccttcaagaattgggaaaatatgagcaatatattaaatggccttggtatgtttggctcggcttcattgctggactaattgccatcgtcatggttacaatcttgctttgttgcatgactagttgttgcagttgcctcaagggtgcatgctcttgtggttcttgctgcaagtttgatgaggatgactctgagccagttctcaagggtgtcaaattacattacacataaacgaacttatggatttgtttatgagattttttactcttagatcaattactgcacagccagtaaaaattgacaatgcttctcctgcaagtactgttcatgctacagcaacgataccgctacaagcctcactccctttcggatggcttgttattggcgttgcatttcttgctgtttttcagagcgctaccaaaataattgcgctcaataaaagatggcagctagccctttataagggcttccagttcatttgcaatttactgctgctatttgttaccatctattcacatcttttgcttgtcgctgcaggtatggaggcgcaatttttgtacctctatgccttgatatattttctacaatgcatcaacgcatgtagaattattatgagatgttggctttgttggaagtgcaaatccaagaacccattactttatgatgccaactactttgtttgctggcacacacataactatgactactgtataccatataacagtgtcacagatacaattgtcgttactgaaggtgacggcatttcaacaccaaaactcaaagaagactaccaaattggtggttattctgaggataggcactcaggtgttaaagactatgtcgttgtacatggctatttcaccgaagtttactaccagcttgagtctacacaaattactacagacactggtattgaaaatgctacattcttcatctttaacaagcttgttaaagacccaccgaatgtgcaaatacacacaatcgacggctcttcaggagttgctaatccagcaatggatccaatttatgatgagccgacgacgactactagcgtgcctttgtaagcacaagaaagtgagtacgaacttatgtactcattcgtttcggaagaaacaggtacgttaatagttaatagcgtacttctttttcttgctttcgtggtattcttgctagtcacactagccatccttactgcgcttcgattgtgtgcgtactgctgcaatattgttaacgtgagtttagtaaaaccaacggtttacgtctactcgcgtgttaaaaatctgaactcttctgaaggagttcctgatcttctggtctaaacgaactaactattattattattctgtttggaactttaacattgcttatcatggcagacaacggtactattaccgttgaggagcttaaacaactcctggaacaatggaacctagtaataggtttcctattcctagcctggattatgttactacaatttgcctattctaatcggaacaggtttttgtacataataaagcttgttttcctctggctcttgtggccagtaacacttgcttgttttgtgcttgctgctgtctacagaattaattgggtgactggcgggattgcgattgcaatggcttgtattgtaggcttgatgtggcttagctacttcgttgcttccttcaggctgtttgctcgtacccgctcaatgtggtcattcaacccagaaacaaacattcttctcaatgtgcctctccgggggacaattgtgaccagaccgctcatggaaagtgaacttgtcattggtgctgtgatcattcgtggtcacttgcgaatggccggacactccctagggcgctgtgacattaaggacctgccaaaagagatcactgtggctacatcacgaacgctttcttattacaaattaggagcgtcgcagcgtgtaggcactgattcaggttttgctgcatacaaccgctaccgtattggaaactataaattaaatacagaccacgccggtagcaacgacaatattgctttgctagtacagtaagtgacaacagatgtttcatcttgttgacttccaggttacaatagcagagatattgattatcattatgaggactttcaggattgctatttggaatcttgacgttataataagttcaatagtgagacaattatttaagcctctaactaagaagaattattcggagttagatgatgaagaacctatggagttagattatccataaaacgaacatgaaaattattctcttcctgacattgattgtatttacatcttgcgagctatatcactatcaggagtgtgttagaggtacgactgtactactaaaagaaccttgcccatcaggaacatacgagggcaattcaccatttcaccctcttgctgacaataaatttgcactaacttgcactagcacacactttgcttttgcttgtgctgacggtactcgacatacctatcagctgcgtgcaagatcagtttcaccaaaacttttcatcagacaagaggaggttcaacaagagctctactcgccactttttctcattgttgctgctctagtatttttaatactttgcttcaccattaagagaaagacagaatgaatgagctcactttaattgacttctatttgtgctttttagcctttctgctattccttgttttaataatgcttattatattttggttttcactcgaaatccaggatctagaagaaccttgtaccaaagtctaaacgaacatgaaacttctcattgttttgacttgtatttctctatgcagttgcatatgcactgtagtacagcgctgtgcatctaataaacctcatgtgcttgaagatccttgtaaggtacaacactaggggtaatacttatagcactgcttggctttgtgctctaggaaaggttttaccttttcatagatggcacactatggttcaaacatgcacacctaatgttactatcaactgtcaagatccagctggtggtgcgcttatagctaggtgttggtaccttcatgaaggtcaccaaactgctgcatttagagacgtacttgttgttttaaataaacgaacaaattaaaatgtctgataatggaccccaatcaaaccaacgtagtgccccccgcattacatttggtggacccacagattcaactgacaataaccagaatggaggacgcaatggggcaaggccaaaacagcgccgaccccaaggtttacccaataatactgcgtcttggttcacagctctcactcagcatggcaaggaggaacttagattccctcgaggccagggcgttccaatcaacaccaatagtggtccagatgaccaaattggctactaccgaagagctacccgacgagttcgtggtggtgacggcaaaatgaaagagctcagccccagatggtacttctattacctaggaactggcccagaagcttcacttccctacggcgctaacaaagaaggcatcgtatgggttgcaactgagggagccttgaatacacccaaagaccacattggcacccgcaatcctaataacaatgctgccaccgtgctacaacttcctcaaggaacaacattgccaaaaggcttctacgcagagggaagcagaggcggcagtcaagcctcttctcgctcctcatcacgtagtcgcggtaattcaagaaattcaactcctggcagcagtaggggaaattctcctgctcgaatggctagcggaggtggtgaaactgccctcgcgctattgctgctagacagattgaaccagcttgagagcaaagtttctggtaaaggccaacaacaacaaggccaaactgtcactaagaaatctgctgctgaggcatctaaaaagcctcgccaaaaacgtactgccacaaaacagtacaacgtcactcaagcatttgggagacgtggtccagaacaaacccaaggaaatttcggggaccaagacctaatcagacaaggaactgattacaaacattggccgcaaattgcacaatttgctccaagtgcctctgcattctttggaatgtcacgcattggcatggaagtcacaccttcgggaacatggctgacttatcatggagccattaaattggatgacaaagatccacaattcaaagacaacgtcatactgctgaacaagcacattgacgcatacaaaacattcccaccaacagagcctaaaaaggacaaaaagaaaaagactgatgaagctcagcctttgccgcagagacaaaagaagcagcccactgtgactcttcttcctgcggctgacatggatgatttctccagacaacttcaaaattccatgagtggagcttctgctgattcaactcaggcataaacactcatgatgaccacacaaggcagatgggctatgtaaacgttttcgcaattccgtttacgatacatagtctactcttgtgcagaatgaattctcgtaactaaacagcacaagtaggtttagttaactttaatctcacatagcaatctttaatcaatgtgtaacattagggaggacttgaaagagccaccacattttcatcgaggccacgcggagtacgatcgagggtacagtgaataatgctagggagagctgcctatatggaagagccctaatgtgtaaaattaattttagtagtgctatccccatgtgattttaatagcttcttaggagaatgacaaaaaaaaaaaaaaaaaaaaaaaa

SEQ ID NO: 75 - DNA, 29736 bp, Coronavirus
ctacccaggaaaagccaaccaacctcgatctcttgtagatctgttctctaaacgaactttaaaatctgtgtagctgtcgctcggctgcatgcctagtgcacctacgcagtataaacaataataaattttactgtcgttgacaagaaacgagtaactcgtccctcttctgcagactgcttacggtttcgtccgtgttgcagtcgatcatcagcatacctaggtttcgtccgggtgtgaccgaaaggtaagatggagagccttgttcttggtgtcaacgagaaaacacacgtccaactcagtttgcctgtccttcaggttagagacgtgctagtgcgtggcttcggggactctgtggaagaggccctatcggaggcacgtgaacacctcaaaaatggcacttgtggtctagtagagctggaaaaaggcgtactgccccagcttgaacagccctatgtgttcattaaacgttctgatgccttaagcaccaatcacggccacaaggtcgttgagctggttgcagaaatggacggcattcagtacggtcgtagcggtataacactgggagtactcgtgccacatgtgggcgaaaccccaattgcataccgcaatgttcttcttcgtaagaacggtaataagggagccggtggtcatagctatggcatcgatctaaagtcttatgacttaggtgacgagcttggcactgatcccattgaagattatgaacaaaactggaacactaagcatggcagtggtgcactccgtgaactcactcgtgagctcaatggaggtgcagtcactcgctatgtcgacaacaatttctgtggcccagatgggtaccctcttgattgcatcaaagattttctcgcacgcgcgggcaagtcaatgtgcactctttccgaacaacttgattacatcgagtcgaagagaggtgtctactgctgccgtgaccatgagcatgaaattgcctggttcactgagcgctctgataagagctacgagcaccagacacccttcgaaattaagagtgccaagaaatttgacactttcaaaggggaatgcccaaagtttgtgtttcctcttaactcaaaagtcaaagtcattcaaccacgtgttgaaaagaaaaagactgagggtttcatggggcgtatacgctctgtgtaccctgttgcatctccacaggagtgtaacaatatgcacttgtctaccttgatgaaatgtaatcattgcgatgaagtttcatggcagacgtgcgactttctgaaagccacttgtgaacattgtggcactgaaaatttagttattgaaggacctactacatgtgggtacctacctactaatgctgtagtgaaaatgccatgtcctgcctgtcaagacccagagattggacctgagcatagtgttgcagattatcacaaccactcaaacattgaaactcgactccgcaagggaggtaggactagatgttttggaggctgtgtgtttgcctatgttggctgctataataagcgtgcctactgggttcctcgtgctagtgctgatattggctcaggccatactggcattactggtgacaatgtggagaccttgaatgaggatctccttgagatactgagtcgtgaacgtgttaacattaacattgttggcgattttcatttgaatgaagaggttgccatcattttggcatctttctctgcttctacaagtgcctttattgacactataaagagtcttgattacaagtctttcaaaaccattgttgagtcctgcggtaactataaagttaccaagggaaagcccgtaaaaggtgcttggaacattggacaacagagatcagttttaacaccactgtgtggttttccctcacaggctgctggtgttatcagatcaatttttgcgcgcacacttgatgcagcaaaccactcaattcctgatttgcaaagagcagctgtcaccatacttgatggtatttctgaacagtcattacgtcttgtcgacgccatggtttatacttcagacctgctcaccaacagtgtcattattatggcatatgtaactggtggtcttgtacaacagacttctcagtggttgtctaatcttttgggcactactgttgaaaaactcaggcctatctttgaatggattgaggcgaaacttagtgcaggagttgaatttctcaaggatgcttgggagattctcaaatttctcattacaggtgtttttgacatcgtcaagggtcaaatacaggttgcttcagataacatcaaggattgtgtaaaatgcttcattgatgttgttaacaaggcactcgaaatgtgcattgatcaagtcactatcgctggcgcaaagttgcgatcactcaacttaggtgaagtcttcatcgctcaaagcaagggactttaccgtcagtgtatacgtggcaaggagcagctgcaactactcatgcctcttaaggcaccaaaagaagtaacctttcttgaaggtgattcacatgacacagtacttacctctgaggaggttgttctcaagaacggtgaactcgaagcactcgagacgcccgttgatagcttcacaaatggagctatcgtcggcacaccagtctgtgtaaatggcctcatgctcttagagattaaggacaaagaacaatactgcgcattgtctcctggtttactggctacaaacaatgtctttcgcttaaaagggggtgcaccaattaaaggtgtaacctttggagaagatactgtttgggaagttcaaggttacaagaatgtgagaatcacatttgagcttgatgaacgtgttgacaaagtgcttaatgaaaagtgctctgtctacactgttgaatccggtaccgaagttactgagtttgcatgtgttgtagcagaggctgttgtgaagactttacaaccagtttctgatctccttaccaacatgggtattgatcttgatgagtggagtgtagctacattctacttatttgatgatgctggtgaagaaaacttttcatcacgtatgtattgttccttttaccctccagatgaggaagaagaggacgatgcagagtgtgaggaagaagaaattgatgaaacctgtgaacatgagtacggtacagaggatgattatcaaggtctccctctggaatttggtgcctcagctgaaacagttcgagttgaggaagaagaagaggaagactggctggatgatactactgagcaatcagagattgagccagaaccagaacctacacctgaagaaccagttaatcagtttactggttatttaaaacttactgacaatgttgccattaaatgtgttgacatcgttaaggaggcacaaagtgctaatcctatggtgattgtaaatgctgctaacatacacctgaaacatggtggtggtgtagcaggtgcactcaacaaggcaaccaatggtgccatgcaaaaggagagtgatgattacattaagctaaatggccctcttacagtaggagggtcttgtttgctttctggacataatcttgctaagaagtgtctgcatgttgttggacctaacctaaatgcaggtgaggacatccagcttcttaaggcagcatatgaaaatttcaattcacaggacatcttacttgcaccattgttgtcagcaggcatatttggtgctaaaccacttcagtctttacaagtgtgcgtgcagacggttcgtacacaggtttatattgcagtcaatgacaaagctctttatgagcaggttgtcatggattatcttgataacctgaagcctagagtggaagcacctaaacaagaggagccaccaaacacagaagattccaaaactgaggagaaatctgtcgtacagaagcctgtcgatgtgaagccaaaaattaaggcctgcattgatgaggttaccacaacactggaagaaactaagtttcttaccaataagttactcttgtttgctgatatcaatggtaagctttaccatgattctcagaacatgcttagaggtgaagatatgtctttccttgagaaggatgcaccttacatggtaggtgatgttatcactagtggtgatatcacttgtgttgtaataccctccaaaaaggctggtggcactactgagatgctctcaagagctttgaagaaagtgccagttgatgagtatataaccacgtaccctggacaaggatgtgctggttatacacttgaggaagctaagactgctcttaagaaatgcaaatctgcattttatgtactaccttcagaagcacctaatgctaaggaagagattctaggaactgtatcctggaatttgagagaaatgcttgctcatgctgaagagacaagaaaattaatgcctatatgcatggatgttagagccataatggcaaccatccaacgtaagtataaaggaattaaaattcaagagggcatcgttgactatggtgtccgattcttcttttatactagtaaagagcctgtagcttctattattacgaagctgaactctctaaatgagccgcttgtcacaatgccaattggttatgtgacacatggttttaatcttgaagaggctgcgcgctgtatgcgttctcttaaagctcctgccgtagtgtcagtatcatcaccagatgctgttactacatataatggatacctcacttcgtcatcaaagacatctgaggagcactttgtagaaacagtttctttggctggctcttacagagattggtcctattcaggacagcgtacagagttaggtgttgaatttcttaagcgtggtgacaaaattgtgtaccacactctggagagccccgtcgagtttcatcttgacggtgaggttctttcacttgacaaactaaagagtctcttatccctgcgggaggttaagactataaaagtgttcacaactgtggacaacactaatctccacacacagcttgtggatatgtctatgacatatggacagcagtttggtccaacatacttggatggtgctgatgttacaaaaattaaacctcatgtaaatcatgagggtaagactttctttgtactacctagtgatgacacactacgtagtgaagctttcgagtactaccatactcttgatgagagttttcttggtaggtacatgtctgctttaaaccacacaaagaaatggaaatttcctcaagttggtggtttaacttcaattaaatgggctgataacaattgttatttgtctagtgttttattagcacttcaacagcttgaagtcaaattcaatgcaccagcacttcaagaggcttattatagagcccgtgctggtgatgctgctaacttttgtgcactcatactcgcttacagtaataaaactgttggcgagcttggtgatgtcagagaaactatgacccatcttctacagcatgctaatttggaatctgcaaagcgagttcttaatgtggtgtgtaaacattgtggtcagaaaactactaccttaacgggtgtagaagctgtgatgtatatgggtactctatcttatgataatcttaagacaggtgtttccattccatgtgtgtgtggtcgtgatgctacacaatatctagtacaacaagagtcttcttttgttatgatgtctgcaccacctgctgagtataaattacagcaaggtacattcttatgtgcgaatgagtacactggtaactatcagtgtggtcattacactcatataactgctaaggagaccctctatcgtattgacggagctcaccttacaaagatgtcagagtacaaaggaccagtgactgatgttttctacaaggaaacatcttacactacaaccatcaagcctgtgtcgtataaactcgatggagttacttacacagagattgaaccaaaattggatgggtattataaaaaggataatgcttactatacagagcagcctatagaccttgtaccaactcaaccattaccaaatgcgagttttgataatttcaaactcacatgttctaacacaaaatttgctgatgatttaaatcaaatgacaggcttcacaaagccagcttcacgagagctatctgtcacattcttcccagacttgaatggcgatgtagtggctattgactatagacactattcagcgagtttcaagaaaggtgctaaattactgcataagccaattgtttggcacattaaccaggctacaaccaagacaacgttcaaaccaaacacttggtgtttacgttgtctttggagtacaaagccagtagatacttcaaattcatttgaagttctggcagtagaagacacacaaggaatggacaatcttgcttgtgaaagtcaacaacccacctctgaagaagtagtggaaaatcctaccatacagaaggaagtcatagagtgtgacgtgaaaactaccgaagttgtaggcaatgtcatacttaaaccatcagatgaaggtgttaaagtaacacaagagttaggtcatgaggatcttatggctgcttatgtggaaaacacaagcattaccattaagaaacctaatgagctttcactagccttaggtttaaaaacaattgccactcatggtattgctgcaattaatagtgttccttggagtaaaattttggcttatgtcaaaccattcttaggacaagcagcaattacaacatcaaattgcgctaagagattagcacaacgtgtgtttaacaattatatgccttatgtgtttacattattgttccaattgtgtacttttactaaaagtaccaattctagaattagagcttcactacctacaactattgctaaaaatagtgttaagagtgttgctaaattatgtttggatgccggcattaattatgtgaagtcacccaaattttctaaattgttcacaatcgctatgtggctattgttgttaagtatttgcttaggttctctaatctgtgtaactgctgcttttggtgtactcttatctaattttggtgctccttcttattgtaatggcgttagagaattgtatcttaattcgtctaacgttactactatggatttctgtgaaggttcttttccttgcagcatttgtttaagtggattagactcccttgattcttatccagctcttgaaaccattcaggtgacgatttcatcgtacaagctagacttgacaattttaggtctggccgctgagtgggttttggcatatatgttgttcacaaaattcttttatttattaggtctttcagctataatgcaggtgttctttggctattttgctagtcatttcatcagcaattcttggctcatgtggtttatcattagtattgtacaaatggcacccgtttctgcaatggttaggatgtacatcttctttgcttctttctactacatatggaagagctatgttcatatcatggatggttgcacctcttcgacttgcatgatgtgctataagcgcaatcgtgccacacgcgttgagtgtacaactattgttaatggcatgaagagatctttctatgtctatgcaaatggaggccgtggcttctgcaagactcacaattggaattgtctcaattgtgacacattttgcactggtagtacattcattagtgatgaagttgctcgtgatttgtcactccagtttaaaagaccaatcaaccctactgaccagtcatcgtatattgttgatagtgttgctgtgaaaaatggcgcgcttcacctctactttgacaaggctggtcaaaagacctatgagagacatccgctctcccattttgtcaatttagacaatttgagagctaacaacactaaaggttcactgcctattaatgtcatagtttttgatggcaagtccaaatgcgacgagtctgcttctaagtctgcttctgtgtactacagtcagctgatgtgccaacctattctgttgcttgaccaagctcttgtatcagacgttggagatagtactgaagtttccgttaagatgtttgatgcttatgtcgacaccttttcagcaacttttagtgttcctatggaaaaacttaaggcacttgttgctacagctcacagcgagttagcaaagggtgtagctttagatggtgtcctttctacattcgtgtcagctgcccgacaaggtgttgttgataccgatgttgacacaaaggatgttattgaatgtctcaaactttcacatcactctgacttagaagtgacaggtgacagttgtaacaatttcatgctcacctataataaggttgaaaacatgacgcccagagatcttggcgcatgtattgactgtaatgcaaggcatatcaatgcccaagtagcaaaaagtcacaatgtttcactcatctggaatgtaaaagactacatgtctttatctgaacagctgcgtaaacaaattcgtagtgctgccaagaagaacaacataccttttagactaacttgtgctacaactagacaggttgtcaatgtcataactactaaaatctcactcaagggtggtaagattgttagtacttgttttaaacttatgcttaaggccacattattgtgcgttcttgctgcattggtttgttatatcgttatgccagtacatacattgtcaatccatgatggttacacaaatgaaatcattggttacaaagccattcaggatggtgtcactcgtgacatcatttctactgatgattgttttgcaaataaacatgctggttttgacgcatggtttagccagcgtggtggttcatacaaaaatgacaaaagctgccctgtagtagctgctatcattacaagagagattggtttcatagtgcctggcttaccgggtactgtgctgagagcaatcaatggtgacttcttgcattttctacctcgtgtttttagtgctgttggcaacatttgctacacaccttccaaactcattgagtatagtgattttgctacctctgcttgcgttcttgctgctgagtgtacaatttttaaggatgctatgggcaaacctgtgccatattgttatgacactaatttgctagagggttctatttcttatagtgagcttcgtccagacactcgttatgtgcttatggatggttccatcatacagtttcctaacacttacctggagggttctgttagagtagtaacaacttttgatgctgagtactgtagacatggtacatgcgaaaggtcagaagtaggtatttgcctatctaccagtggtagatgggttcttaataatgagcattacagagctctatcaggagttttctgtggtgttgatgcgatgaatctcatagctaacatctttactcctcttgtgcaacctgtgggtgctttagatgtgtctgcttcagtagtggctggtggtattattgccatattggtgacttgtgctgcctactactttatgaaattcagacgtgtttttggtgagtacaaccatgttgttgctgctaatgcacttttgtttttgatgtctttcactatactctgtctggtaccagcttacagctttctgccgggagtctactcagtcttttacttgtacttgacattctatttcaccaatgatgtttcattcttggctcaccttcaatggtttgccatgttttctcctattgtgcctttttggataacagcaatctatgtattctgtatttctctgaagcactgccattggttctttaacaactatcttaggaaaagagtcatgtttaatggagttacatttagtaccttcgaggaggctgctttgtgtacctttttgctcaacaaggaaatgtacctaaaattgcgtagcgagacactgttgccacttacacagtataacaggtatcttgctctatataacaagtacaagtatttcagtggagccttagatactaccagctatcgtgaagcagcttgctgccacttagcaaaggctctaaatgactttagcaactcaggtgctgatgttctctaccaaccaccacagacatcaatcacttctgctgttctgcagagtggttttaggaaaatggcattcccgtcaggcaaagttgaagggtgcatggtacaagtaacctgtggaactacaactcttaatggattgtggttggatgacacagtatactgtccaagacatgtcatttgcacagcagaagacatgcttaatcctaactatgaagatctgctcattcgcaaatccaaccatagctttcttgttcaggctggcaatgttcaacttcgtgttattggccattctatgcaaaattgtctgcttaggcttaaagttgatacttctaaccctaagacacccaagtataaatttgtccgtatccaacctggtcaaacattttcagttctagcatgctacaatggttcaccatctggtgtttatcagtgtgccatgagacctaatcataccattaaaggttctttccttaatggatcatgtggtagtgttggttttaacattgattatgattgcgtgtctttctgctatatgcatcatatggagcttccaacaggagtacacgctggtactgacttagaaggtaaattctatggtccatttgttgacagacaaactgcacaggctgcaggtacagacacaaccataacattaaatgttttggcatggctgtatgctgctgttatcaatggtgataggtggtttcttaatagattcaccactactttgaatgactttaaccttgtggcaatgaagtacaactatgaacctttgacacaagatcatgttgacatattgggacctctttctgctcaaacaggaattgccgtcttagatatgtgtgctgctttgaaagagctgctgcagaatggtatgaatggtcgtactatccttggtagcactattttagaagatgagtttacaccatttgatgttgttagacaatgctctggtgttaccttccaaggtaagttcaagaaaattgttaagggcactcatcattggatgcttttaactttcttgacatcactattgattcttgttcaaagtacacagtggtcactgtttttctttgtttacgagaatgctttcttgccatttactcttggtattatggcaattgctgcatgtgctatgctgcttgttaagcataagcacgcattcttgtgcttgtttctgttaccttctcttgcaacagttgcttactttaatatggtctacatgcctgctagctgggtgatgcgtatcatgacatggcttgaattggctgacactagcttgtctggttataggcttaaggattgtgttatgtatgcttcagctttagttttgcttattctcatgacagctcgcactgtttatgatgatgctgctagacgtgtttggacactgatgaatgtcattacacttgtttacaaagtctactatggtaatgctttagatcaagctatttccatgtgggccttagttatttctgtaacctctaactattctggtgtcgttacgactatcatgtttttagctagagctatagtgtttgtgtgtgttgagtattacccattgttatttattactggcaacaccttacagtgtatcatgcttgtttattgtttcttaggctattgttgctgctgctactttggccttttctgtttactcaaccgttacttcaggcttactcttggtgtttatgactacttggtctctacacaagaatttaggtatatgaactcccaggggcttttgcctcctaagagtagtattgatgctttcaagcttaacattaagttgttgggtattggaggtaaaccatgtatcaaggttgctactgtacagtctaaaatgtctgacgtaaagtgcacatctgtggtactgctctcggttcttcaacaacttagagtagagtcatcttctaaattgtgggcacaatgtgtacaactccacaatgatattcttcttgcaaaagacacaactgaagctttcgagaagatggtttctcttttgtctgttttgctatccatgcagggtgctgtagacattaataggttgtgcgaggaaatgctcgataaccgtgctactcttcaggctattgcttcagaatttagttctttaccatcatatgccgcttatgccactgcccaggaggcctatgagcaggctgtagctaatggtgattctgaagtcgttctcaaaaagttaaagaaatctttgaatgtggctaaatctgagtttgaccgtgatgctgccatgcaacgcaagttggaaaagatggcagatcaggctatgacccaaatgtacaaacaggcaagatctgaggacaagagggcaaaagtaactagtgctatgcaaacaatgctcttcactatgcttaggaagcttgataatgatgcacttaacaacattatcaacaatgcgcgtgatggttgtgttccactcaacatcataccattgactacagcagccaaactcatggttgttgtccctgattatggtacctacaagaacacttgtgatggtaacacctttacatatgcatctgcactctgggaaatccagcaagttgttgatgcggatagcaagattgttcaacttagtgaaattaacatggacaattcaccaaatttggcttggcctcttattgttacagctctaagagccaactcagctgttaaactacagaataatgaactgagtccagtagcactacgacagatgtcctgtgcggctggtaccacacaaacagcttgtactgatgacaatgcacttgcctactataacaattcgaagggaggtaggtttgtgctggcattactatcagaccaccaagatctcaaatgggctagattccctaagagtgatggtacaggtacaatttacacagaactggaaccaccttgtaggtttgttacagacacaccaaaagggcctaaagtgaaatacttgtacttcatcaaaggcttaaacaacctaaatagaggtatggtgctgggcagtttagctgctacagtacgtcttcaggctggaaatgctacagaagtacctgccaattcaactgtgctttccttctgtgcttttgcagtagaccctgctaaagcatataaggattacctagcaagtggaggacaaccaatcaccaactgtgtgaagatgttgtgtacacacactggtacaggacaggcaattactgtaacaccagaagctaacatggaccaagagtcctttggtggtgcttcatgttgtctgtattgtagatgccacattgaccatccaaatcctaaaggattctgtgacttgaaaggtaagtacgtccaaatacctaccacttgtgctaatgacccagtgggttttacacttagaaacacagtctgtaccgtctgcggaatgtggaaaggttatggctgtagttgtgaccaactccgcgaacccttgatgcagtctgcggatgcatcaacgtttttaaacgggtttgcggtgtaagtgcagcccgtcttacaccgtgcggcacaggcactagtactgatgtcgtctacagggcttttgatatttacaacgaaaaagttgctggttttgcaaagttcctaaaaactaattgctgtcgcttccaggagaaggatgaggaaggcaatttattagactcttactttgtagttaagaggcatactatgtctaactaccaacatgaagagactatttataacttggttaaagattgtccagcggttgctgtccatgactttttcaagtttagagtagatggtgacatggtaccacatatatcacgtcagcgtctaactaaatacacaatggctgatttagtctatgctctacgtcattttgatgagggtaattgtgatacattaaaagaaatactcgtcacatacaattgctgtgatgatgattatttcaataagaaggattggtatgacttcgtagagaatcctgacatcttacgcgtatatgctaacttaggtgagcgtgtacgccaatcattattaaagactgtacaattctgcgatgctatgcgtgatgcaggcattgtaggcgtactgacattagataatcaggatcttaatgggaactggtacgatttcggtgatttcgtacaagtagcaccaggctgcggagttcctattgtggattcatattactcattgctgatgcccatcctcactttgactagggcattggctgctgagtcccatatggatgctgatctcgcaaaaccacttattaagtgggatttgctgaaatatgattttacggaagagagactttgtctcttcgaccgttattttaaatattgggaccagacataccatcccaattgtattaactgtttggatgataggtgtatccttcattgtgcaaactttaatgtgttattttctactgtgtttccacctacaagttttggaccactagtaagaaaaatatttgtagatggtgttccttttgttgtttcaactggataccattttcgtgagttaggagtcgtacataatcaggatgtaaacttacatagctcgcgtctcagtttcaaggaacttttagtgtatgctgctgatccagctatgcatgcagcttctggcaatttattgctagataaacgcactacatgcttttcagtagctgcactaacaaacaatgttgcttttcaaactgtcaaacccggtaattttaataaagacttttatgactttgctgtgtctaaaggtttctttaaggaaggaagttctgttgaactaaaacacttcttctttgctcaggatggcaacgctgctatcagtgattatgactattatcgttataatctgccaacaatgtgtgatatcagacaactcctattcgtagttgaagttgttgataaatactttgattgttacgatggtggctgtattaatgccaaccaagtaatcgttaacaatctggataaatcagctggtttcccatttaataaatggggtaaggctagactttattatgactcaatgagttatgaggatcaagatgcacttttcgcgtatactaagcgtaatgtcatccctactataactcaaatgaatcttaagtatgccattagtgcaaagaatagagctcgcaccgtagctggtgtctctatctgtagtactatgacaaatagacagtttcatcagaaattattgaagtcaatagccgccactagaggagctactgtggtaattggaacaagcaagttttacggtggctggcataatatgttaaaaactgtttacagtgatgtagaaactccacaccttatgggttgggattatccaaaatgtgacagagccatgcctaacatgcttaggataatggcctctcttgttcttgctcgcaaacataacacttgctgtaacttatcacaccgtttctacaggttagctaacgagtgtgcgcaagtattaagtgagatggtcatgtgtggcggctcactatatgttaaaccaggtggaacatcatccggtgatgctacaactgcttatgctaatagtgtctttaacatttgtcaagctgttacagccaatgtaaatgcacttctttcaactgatggtaataagatagctgacaagtatgtccgcaatctacaacacaggctctatgagtgtctctatagaaatagggatgttgatcatgaattcgtggatgagttttacgcttacctgcgtaaacatttctccatgatgattctttctgatgatgccgttgtgtgctataacagtaactatgcggctcaaggtttagtagctagcattaagaactttaaggcagttctttattatcaaaataatgtgttcatgtctgaggcaaaatgttggactgagactgaccttactaaaggacctcacgaattttgctcacagcatacaatgctagttaaacaaggagatgattacgtgtacctgccttacccagatccatcaagaatattaggcgcaggctgttttgtcgatgatattgtcaaaacagatggtacacttatgattgaaaggttcgtgtcactggctattgatgcttacccacttacaaaacatcctaatcaggagtatgctgatgtctttcacttgtatttacaatacattagaaagttacatgatgagcttactggccacatgttggacatgtattccgtaatgctaactaatgataacacctcacggtactgggaacctgagttttatgaggctatgtacacaccacatacagtcttgcaggctgtaggtgcttgtgtattgtgcaattcacagacttcacttcgttgcggtgcctgtattaggagaccattcctatgttgcaagtgctgctatgaccatgtcatttcaacatcacacaaattagtgttgtctgttaatccctatgtttgcaatgccccaggttgtgatgtcactgatgtgacacaactgtatctaggaggtatgagctattattgcaagtcacataagcctcccattagttttccattatgtgctaatggtcaggtttttggtttatacaaaaacacatgtgtaggcagtgacaatgtcactgacttcaatgcgatagcaacatgtgattggactaatgctggcgattacatacttgccaacacttgtactgagagactcaagcttttcgcagcagaaacgctcaaagccactgaggaaacatttaagctgtcatatggtattgccactgtacgcgaagtactctctgacagagaattgcatctttcatgggaggttggaaaacctagaccaccattgaacagaaactatgtctttactggttaccgtgtaactaaaaatagtaaagtacagattggagagtacacctttgaaaaaggtgactatggtgatgctgttgtgtacagaggtactacgacatacaagttgaatgttggtgattactttgtgttgacatctcacactgtaatgccacttagtgcacctactctagtgccacaagagcactatgtgagaattactggcttgtacccaacactcaacatctcagatgagttttctagcaatgttgcaaattatcaaaaggtcggcatgcaaaagtactctacactccaaggaccacctggtactggtaagagtcattttgccatcggacttgctctctattacccatctgctcgcatagtgtatacggcatgctctcatgcagctgttgatgccctatgtgaaaaggcattaaaatatttgcccatagataaatgtagtagaatcatacctgcgcgtgcgcgcgtagagtgttttgataaattcaaagtgaattcaacactagaacagtatgttttctgcactgtaaatgcattgccagaaacaactgctgacattgtagtctttgatgaaatctctatggctactaattatgacttgagtgttgtcaatgctagacttcgtgcaaaacactacgtctatattggcgatcctgctcaattaccagccccccgcacattgctgactaaaggcacactagaaccagaatattttaattcagtgtgcagacttatgaaaacaataggtccagacatgttccttggaacttgtcgccgttgtcctgctgaaattgttgacactgtgagtgctttagtttatgacaataagctaaaagcacacaaggataagtcagctcaatgcttcaaaatgttctacaaaggtgttattacacatgatgtttcatctgcaatcaacagacctcaaataggcgttgtaagagaatttcttacacgcaatcctgcttggagaaaagctgtttttatctcaccttataattcacagaacgctgtagcttcaaaaatcttaggattgcctacgcagactgttgattcatcacagggttctgaatatgactatgtcatattcacacaaactactgaaacagcacactcttgtaatgtcaaccgcttcaatgtggctatcacaagggcaaaaattggcattttgtgcataatgtctgatagagatctttatgacaaactgcaatttacaagtctagaaataccacgtcgcaatgtggctacattacaagcagaaaatgtaactggactttttaaggactgtagtaagatcattactggtcttcatcctacacaggcacctacacacctcagcgttgatataaagttcaagactgaaggattatgtgttgacataccaggcataccaaaggacatgacctaccgtagactcatctctatgatgggtttcaaaatgaattaccaagtcaatggttaccctaatatgtttatcacccgcgaagaagctattcgtcacgttcgtgcgtggattggctttgatgtagagggctgtcatgcaactagagatgctgtgggtactaacctacctctccagctaggattttctacaggtgttaacttagtagctgtaccgactggttatgttgacactgaaaataacacagaattcaccagagttaatgcaaaacctccaccaggtgaccagtttaaacatcttataccactcatgtataaaggcttgccctggaatgtagtgcgtattaagatagtacaaatgctcagtgatacactgaaaggattgtcagacagagtcgtgttcgtcctttgggcgcatggctttgagcttacatcaatgaagtactttgtcaagattggacctgaaagaacgtgttgtctgtgtgacaaacgtgcaacttgcttttctacttcatcagatacttatgcctgctggaatcattctgtgggttttgactatgtctataacccatttatgattgatgttcagcagtggggctttacgggtaaccttcagagtaaccatgaccaacattgccaggtacatggaaatgcacatgtggctagttgtgatgctatcatgactagatgtttagcagtccatgagtgctttgttaagcgcgttgattggtctgttgaataccctattataggagatgaactgagggttaattctgcttgcagaaaagtacaacacatggttgtgaagtctgcattgcttgctgataagtttccagttcttcatgacattggaaatccaaaggctatcaagtgtgtgcctcaggctgaagtagaatggaagttctacgatgctcagccatgtagtgacaaagcttacaaaatagaggaactcttctattcttatgctacacatcacgataaattcactgatggtgtttgtttgttttggaattgtaacgttgatcgttacccagccaatgcaattgtgtgtaggtttgacacaagagtcttgtcaaacttgaacttaccaggctgtgatggtggtagtttgtatgtgaataagcatgcattccacactccagctttcgataaaagtgcatttactaatttaaagcaattgcctttcttttactattctgatagtccttgtgagtctcatggcaaacaagtagtgtcggatattgattatgttccactcaaatctgctacgtgtattacacgatgcaatttaggtggtgctgtttgcagacaccatgcaaatgagtaccgacagtacttggatgcatataatatgatgatttctgctggatttagcctatggatttacaaacaatttgatacttataacctgtggaatacatttaccaggttacagagtttagaaaatgtggcttataatgttgttaataaaggacactttgatggacacgccggcgaagcacctgtttccatcattaataatgctgtttacacaaaggtagatggtattgatgtggagatctttgaaaataagacaacacttcctgttaatgttgcatttgagctttgggctaagcgtaacattaaaccagtgccagagattaagatactcaataatttgggtgttgatatcgctgctaatactgtaatctgggactacaaaagagaagccccagcacatgtatctacaataggtgtctgcacaatgactgacattgccaagaaacctactgagagtgcttgttcttcacttactgtcttgtttgatggtagagtggaaggacaggtagacctttttagaaacgcccgtaatggtgttttaataacagaaggttcagtcaaaggtctaacaccttcaaagggaccagcacaagctagcgtcaatggagtcacattaattggagaatcagtaaaaacacagtttaactactttaagaaagtagacggcattattcaacagttgcctgaaacctactttactcagagcagagacttagaggattttaagcccagatcacaaatggaaactgactttctcgagctcgctatggatgaattcatacagcgatataagctcgagggctatgccttcgaacacatcgtttatggagatttcagtcatggacaacttggcggtcttcatttaatgataggcttagccaagcgctcacaagattcaccacttaaattagaggattttatccctatggacagcacagtgaaaaattacttcataacagatgcgcaaacaggttcatcaaaatgtgtgtgttctgtgattgatcttttacttgatgactttgtcgagataataaagtcacaagatttgtcagtgatttcaaaagtggtcaaggttacaattgactatgctgaaatttcattcatgctttggtgtaaggatggacatgttgaaaccttctacccaaaactacaagcaagtcgagcgtggcaaccaggtgttgcgatgcctaacttgtacaagatgcaaagaatgcttcttgaaaagtgtgaccttcagaattatggtgaaaatgctgttataccaaaaggaataatgatgaatgtcgcaaagtatactcaactgtgtcaatacttaaatacacttactttagctgtaccctacaacatgagagttattcactttggtgctggctctgataaaggagttgcaccaggtacagctgtgctcagacaatggttgccaactggcacactacttgtcgattcagatcttaatgacttcgtctccgacgcatattctactttaattggagactgtgcaacagtacatacggctaataaatgggaccttattattagcgatatgtatgaccctaggaccaaacatgtgacaaaagagaatgactctaaagaagggtttttcacttatctgtgtggatttataaagcaaaaactagccctgggtggttctatagctgtaaagataacagagcattcttggaatgctgacctttacaagcttatgggccatttctcatggtggacagcttttgttacaaatgtaaatgcatcatcatcggaagcatttttaattggggctaactatcttggcaagccgaaggaacaaattgatggctataccatgcatgctaactacattttctggaggaacacaaatcctatccagttgtcttcctattcactctttgacatgagcaaatttcctcttaaattaagaggaactgctgtaatgtctcttaaggagaatcaaatcaatgatatgatttattctcttctggaaaaaggtaggcttatcattagagaaaacaacagagttgtggtttcaagtgatattcttgttaacaactaaacgaacatgtttattttcttattatttcttactctcactagtggtagtgaccttgaccggtgcaccacttttgatgatgttcaagctcctaattacactcaacatacttcatctatgaggggggtttactatcctgatgaaatttttagatcagacactctttatttaactcaggatttatttcttccattttattctaatgttacagggtttcatactattaatcatacgtttggcaaccctgtcataccttttaaggatggtatttattttgctgccacagagaaatcaaatgttgtccgtggttgggtttttggttctaccatgaacaacaagtcacagtcggtgattattattaacaattctactaatgttgttatacgagcatgtaactttgaattgtgtgacaaccctttctttgctgtttctaaacccatgggtacacagacacatactatgatattcgataatgcatttaattgcactttcgagtacatatctgatgccttttcgcttgatgtttcagaaaagtcaggtaattttaaacacttacgagagtttgtgtttaaaaataaagatgggtttctctatgtttataagggctatcaacctatagatgtagttcgtgatctaccttctggttttaacactttgaaacctatttttaagttgcctcttggtattaacattacaaattttagagccattcttacagccttttcacctgctcaagacatttggggcacgtcagctgcagcctattttgttggctatttaaagccaactacatttatgctcaagtatgatgaaaatggtacaatcacagatgctgttgattgttctcaaaatccacttgctgaactcaaatgctctgttaagagctttgagattgacaaaggaatttaccagacctctaatttcagggttgttccctcaggagatgttgtgagattccctaatattacaaacttgtgtccttttggagaggtttttaatgctactaaattcccttctgtctatgcatgggagagaaaaaaaatttctaattgtgttgctgattactctgtgctctacaactcaacatttttttcaacctttaagtgctatggcgtttctgccactaagttgaatgatctttgcttctccaatgtctatgcagattcttttgtagtcaagggagatgatgtaagacaaatagcgccaggacaaactggtgttattgctgattataattataaattgccagatgatttcatgggttgtgtccttgcttggaatactaggaacattgatgctacttcaactggtaattataattataaatataggtatcttagacatggcaagcttaggccctttgagagagacatatctaatgtgcctttctcccctgatggcaaaccttgcaccccacctgctcttaattgttattggccattaaatgattatggtttttacaccactactggcattggctaccaaccttacagagttgtagtactttcttttgaacttttaaatgcaccggccacggtttgtggaccaaaattatccactgaccttattaagaaccagtgtgtcaattttaattttaatggactcactggtactggtgtgttaactccttcttcaaagagatttcaaccatttcaacaatttggccgtgatgtttctgatttcactgattccgttcgagatcctaaaacatctgaaatattagacatttcaccttgcgcttttgggggtgtaagtgtaattacacctggaacaaatgcttcatctgaagttgctgttctatatcaagatgttaactgcactgatgtttctacagcaattcatgcagatcaactcacaccagcttggcgcatatattctactggaaacaatgtattccagactcaagcaggctgtcttataggagctgagcatgtcgacacttcttatgagtgcgacattcctattggagctggcatttgtgctagttaccatacagtttctttattacgtagtactagccaaaaatctattgtggcttatactatgtctttaggtgctgatagttcaattgcttactctaataacaccattgctatacctactaacttttcaattagcattactacagaagtaatgcctgtttctatggctaaaacctccgtagattgtaatatgtacatctgcggagattctactgaatgtgctaatttgcttctccaatatggtagcttttgcacacaactaaatcgtgcactctcaggtattgctgctgaacaggatcgcaacacacgtgaagtgttcgctcaagtcaaacaaatgtacaaaaccccaactttgaaatattttggtggttttaatttttcacaaatattacctgaccctctaaagccaactaagaggtcttttattgaggacttgctctttaataaggtgacactcgctgatgctggcttcatgaagcaatatggcgaatgcctaggtgatattaatgctagagatctcatttgtgcgcagaagttcaatggacttacagtgttgccacctctgctcactgatgatatgattgctgcctacactgctgctctagttagtggtactgccactgctggatggacatttggtgctggcgctgctcttcaaataccttttgctatgcaaatggcatataggttcaatggcattggagttacccaaaatgttctctatgagaaccaaaaacaaatcgccaaccaatttaacaaggcgattagtcaaattcaagaatcacttacaacaacatcaactgcattgggcaagctgcaagacgttgttaaccagaatgctcaagcattaaacacacttgttaaacaacttagctctaattttggtgcaatttcaagtgtgctaaatgatatcctttcgcgacttgataaagtcgaggcggaggtacaaattgacaggttaattacaggcagacttcaaagccttcaaacctatgtaacacaacaactaatcagggctgctgaaatcagggcttctgctaatcttgctgctactaaaatgtctgagtgtgttcttggacaatcaaaaagagttgacttttgtggaaagggctaccaccttatgtccttcccacaagcagccccgcatggtgttgtcttcctacatgtcacgtatgtgccatcccaggagaggaacttcaccacagcgccagcaatttgtcatgaaggcaaagcatacttccctcgtgaaggtgtttttgtgtttaatggcacttcttggtttattacacagaggaacttcttttctccacaaataattactacagacaatacatttgtctcaggaaattgtgatgtcgttattggcatcattaacaacacagtttatgatcctctgcaacctgagcttgactcattcaaagaagagctggacaagtacttcaaaaatcatacatcaccagatgttgatcttggcgacatttcaggcattaacgcttctgtcgtcaacattcaaaaagaaattgaccgcctcaatgaggtcgctaaaaatttaaatgaatcactcattgaccttcaagaattgggaaaatatgagcaatatattaaatggccttggtatgtttggctcggcttcattgctggactaattgccatcgtcatggttacaatcttgctttgttgcatgactagttgttgcagttgcctcaagggtgcatgctcttgtggttcttgctgcaagtttgatgaggatgactctgagccagttctcaagggtgtcaaattacattacacataaacgaacttatggatttgtttatgagattttttactcttggatcaattactgcacagccagtaaaaattgacaatgcttctcctgcaagtactgttcatgctacagcaacgataccgctacaagcctcactccctttcggatggcttgttattggcgttgcatttcttgctgtttttcagagcgctaccaaaataattgcgctcaataaaagatggcagctagccctttataagggcttccagttcatttgcaatttactgctgctatttgttaccatctattcacatcttttgcttgtcgctgcaggtatggaggcgcaatttttgtacctctatgccttgatatattttctacaatgcatcaacgcatgtagaattattatgagatgttggctttgttggaagtgcaaatccaagaacccattactttatgatgccaactactttgtttgctggcacacacataactatgactactgtataccatataacagtgtcacagatacaattgtcgttactgaaggtgacggcatttcaacaccaaaactcaaagaagactaccaaattggtggttattctgaggataggcactcaggtgttaaagactatgtcgttgtacatggctatttcaccgaagtttactaccagcttgagtctacacaaattactacagacactggtattgaaaatgctacattcttcatctttaacaagcttgttaaagacccaccgaatgtgcaaatacacacaatcgacggctcttcaggagttgctaatccagcaatggatccaatttatgatgagccgacgacgactactagcgtgcctttgtaagcacaagaaagtgagtacgaacttatgtactcattcgtttcggaagaaacaggtacgttaatagttaatagcgtacttctttttcttgctttcgtggtattcttgctagtcacactagccatccttactgcgcttcgattgtgtgcgtactgctgcaatattgttaacgtgagtttagtaaaaccaacggtttacgtctactcgcgtgttaaaaatctgaactcttctgaaggagttcctgatcttctggtctaaacgaactaactattattattattctgtttggaactttaacattgcttatcatggcagacaacggtactattaccgttgaggagcttaaacaactcctggaacaatggaacctagtaataggtttcctattcctagcctggattatgttactacaatttgcctattctaatcggaacaggtttttgtacataataaagcttgttttcctctggctcttgtggccagtaacacttgcttgttttgtgcttgctgctgtctacagaattaattgggtgactggcgggattgcgattgcaatggcttgtattgtaggcttgatgtggcttagctacttcgttgcttccttcaggctgtttgctcgtacccgctcaatgtggtcattcaacccagaaacaaacattcttctcaatgtgcctctccgggggacaattgtgaccagaccgctcatggaaagtgaacttgtcattggtgctgtgatcattcgtggtcacttgcgaatggccggacactccctagggcgctgtgacattaaggacctgccaaaagagatcactgtggctacatcacgaacgctttcttattacaaattaggagcgtcgcagcgtgtaggcactgattcaggttttgctgcatacaaccgctaccgtattggaaactataaattaaatacagaccacgccggtagcaacgacaatattgctttgctagtacagtaagtgacaacagatgtttcatcttgttgacttccaggttacaatagcagagatattgattatcattatgaggactttcaggattgctatttggaatcttgacgttataataagttcaatagtgagacaattatttaagcctctaactaagaagaattattcggagttagatgatgaagaacctatggagttagattatccataaaacgaacatgaaaattattctcttcctgacattgattgtatttacatcttgcgagctatatcactatcaggagtgtgttagaggtacgactgtactactaaaagaaccttgcccatcaggaacatacgagggcaattcaccatttcaccctcttgctgacaataaatttgcactaacttgcactagcacacactttgcttttgcttgtgctgacggtactcgacatacctatcagctgcgtgcaagatcagtttcaccaaaacttttcatcagacaagaggaggttcaacaagagctctactcgccactttttctcattgttgctgctctagtatttttaatactttgcttcaccattaagagaaagacagaatgaatgagctcactttaattgacttctatttgtgctttttagcctttctgctattccttgttttaataatgcttattatattttggttttcactcgaaatccaggatctagaagaaccttgtaccaaagtctaaacgaacatgaaacttctcattgttttgacttgtatttctctatgcagttgcatatgcactgtagtacagcgctgtgcatctaataaacctcatgtgcttgaagatccttgtaaggtacaacactaggggtaatacttatagcactgcttggctttgtgctctaggaaaggttttaccttttcatagatggcacactatggttcaaacatgcacacctaatgttactatcaactgtcaagatccagctggtggtgcgcttatagctaggtgttggtaccttcatgaaggtcaccaaactgctgcatttagagacgtacttgttgttttaaataaacgaacaaattaaaatgtctgataatggaccccaatcaaaccaacgtagtgccccccgcattacatttggtggacccacagattcaactgacaataaccagaatggaggacgcaatggggcaaggccaaaacagcgccgaccccaaggtttacccaataatactgcgtcttggttcacagctctcactcagcatggcaaggaggaacttagattccctcgaggccagggcgttccaatcaacaccaatagtggtccagatgaccaaattggctactaccgaagagctacccgacgagttcgtggtggtgacggcaaaatgaaagagctcagccccagatggtacttctattacctaggaactggcccagaagcttcacttccctacggcgctaacaaagaaggcatcgtatgggttgcaactgagggagccttgaatacacccaaagaccacattggcacccgcaatcctaataacaatgctgccaccgtgctacaacttcctcaaggaacaacattgccaaaaggcttctacgcagagggaagcagaggcggcagtcaagcctcttctcgctcctcatcacgtagtcgcggtaattcaagaaattcaactcctggcagcagtaggggaaattctcctgctcgaatggctagcggaggtggtgaaactgccctcgcgctattgctgctagacagattgaaccagcttgagagcaaagtttctggtaaaggccaacaacaacaaggccaaactgtcactaagaaatctgctgctgaggcatctaaaaagcctcgccaaaaacgtactgccacaaaacagtacaacgtcactcaagcatttgggagacgtggtccagaacaaacccaaggaaatttcggggaccaagacctaatcagacaaggaactgattacaaacattggccgcaaattgcacaatttgctccaagtgcctctgcattctttggaatgtcacgcattggcatggaagtcacaccttcgggaacatggctgacttatcatggagccattaaattggatgacaaagatccacaattcaaagacaacgtcatactgctgaacaagcacattgacgcatacaaaacattcccaccaacagagcctaaaaaggacaaaaagaaaaagactgatgaagctcagcctttgccgcagagacaaaagaagcagcccactgtgactcttcttcctgcggctgacatggatgatttctccagacaacttcaaaattccatgagtggagcttctgctgattcaactcaggcataaacactcatgatgaccacacaaggcagatgggctatgtaaacgttttcgcaattccgtttacgatacatagtctactcttgtgcagaatgaattctcgtaactaaacagcacaagtaggtttagttaactttaatctcacatagcaatctttaatcaatgtgtaacattagggaggacttgaaagagccaccacattttcatcgaggccacgcggagtacgatcgagggtacagtgaataatgctagggagagctgcctatatggaagagccctaatgtgtaaaattaattttagtagtgctatccccatgtgattttaatagcttcttaggagaatgacaaaaaaaaaaaaaaaaaaaaaaaa

SEQ ID NO: 76 - DNA, 29729 bp, Coronavirus
atattaggtttttacctacccaggaaaagccaaccaacctcgatctcttgtagatctgttctctaaacgaactttaaaatctgtgtagctgtcgctcggctgcatgcctagtgcacctacgcagtataaacaataataaattttactgtcgttgacaagaaacgagtaactcgtccctcttctgcagactgcttacggtttcgtccgtgttgcagtcgatcatcagcatacctaggtttcgtccgggtgtgaccgaaaggtaagatggagagccttgttcttggtgtcaacgagaaaacacacgtccaactcagtttgcctgtccttcaggttagagacgtgctagtgcgtggcttcggggactctgtggaagaggccctatcggaggcacgtgaacacctcaaaaatggcacttgtggtctagtagagctggaaaaaggcgtactgccccagcttgaacagccctatgtgttcattaaacgttctgatgccttaagcaccaatcacggccacaaggtcgttgagctggttgcagaaatggacggcattcagtacggtcgtagcggtataacactgggagtactcgtgccacatgtgggcgaaaccccaattgcataccgcaatgttcttcttcgtaagaacggtaataagggagccggtggtcatagctatggcatcgatctaaagtcttatgacttaggtgacgagcttggcactgatcccattgaagattatgaacaaaactggaacactaagcatggcagtggtgcactccgtgaactcactcgtgagctcaatggaggtgcagtcactcgctatgtcgacaacaatttctgtggcccagatgggtaccctcttgattgcatcaaagattttctcgcacgcgcgggcaagtcaatgtgcactctttccgaacaacttgattacatcgagtcgaagagaggtgtctactgctgccgtgaccatgagcatgaaattgcctggttcactgagcgctctgataagagctacgagcaccagacacccttcgaaattaagagtgccaagaaatttgacactttcaaaggggaatgcccaaagtttgtgtttcctcttaactcaaaagtcaaagtcattcaaccacgtgttgaaaagaaaaagactgagggtttcatggggcgtatacgctctgtgtaccctgttgcatctccacaggagtgtaacaatatgcacttgtctaccttgatgaaatgtaatcattgcgatgaagtttcatggcagacgtgcgactttctgaaagccacttgtgaacattgtggcactgaaaatttagttattgaaggacctactacatgtgggtacctacctactaatgctgtagtgaaaatgccatgtcctgcctgtcaagacccagagattggacctgagcatagtgttgcagattatcacaaccactcaaacattgaaactcgactccgcaagggaggtaggactagatgttttggaggctgtgtgtttgcctatgttggctgctataataagcgtgcctactgggttcctcgtgctagtgctgatattggctcaggccatactggcattactggtgacaatgtggagaccttgaatgaggatctccttgagatactgagtcgtgaacgtgttaacattaacattgttggcgattttcatttgaatgaagaggttgccatcattttggcatctttctctgcttctacaagtgcctttattgacactataaagagtcttgattacaagtctttcaaaaccattgttgagtcctgcggtaactataaagttaccaagggaaagcccgtaaaaggtgcttggaacattggacaacagagatcagttttaacaccactgtgtggttttccctcacaggctgctggtgttatcagatcaatttttgcgcgcacacttgatgcagcaaaccactcaattcctgatttgcaaagagcagctgtcaccatacttgatggtatttctgaacagtcattacgtcttgtcgacgccatggtttatacttcagacctgctcaccaacagtgtcattattatggcatatgtaactggtggtcttgtacaacagacttctcagtggttgtctaatcttttgggcactactgttgaaaaactcaggcctatctttgaatggattgaggcgaaacttagtgcaggagttgaatttctcaaggatgcttgggagattctcaaatttctcattacaggtgtttttgacatcgtcaagggtcaaatacaggttgcttcagataacatcaaggattgtgtaaaatgcttcattgatgttgttaacaaggcactcgaaatgtgcattgatcaagtcactatcgctggcgcaaagttgcgatcactcaacttaggtgaagtcttcatcgctcaaagcaagggactttaccgtcagtgtatacgtggcaaggagcagctgcaactactcatgcctcttaaggcaccaaaagaagtaacctttcttgaaggtgattcacatgacacagtacttacctctgaggaggttgttctcaagaacggtgaactcgaagcactcgagacgcccgttgatagcttcacaaatggagctatcgttggcacaccagtctgtgtaaatggcctcatgctcttagagattaaggacaaagaacaatactgcgcattgtctcctggtttactggctacaaacaatgtctttcgcttaaaagggggtgcaccaattaaaggtgtaacctttggagaagatactgtttgggaagttcaaggttacaagaatgtgagaatcacatttgagcttgatgaacgtgttgacaaagtgcttaatgaaaagtgctctgtctacactgttgaatccggtaccgaagttactgagtttgcatgtgttgtagcagaggctgttgtgaagactttacaaccagtttctgatctccttaccaacatgggtattgatcttgatgagtggagtgtagctacattctacttatttgatgatgctggtgaagaaaacttttcatcacgtatgtattgttccttttaccctccagatgaggaagaagaggacgatgcagagtgtgaggaagaagaaattgatgaaacctgtgaacatgagtacggtacagaggatgattatcaaggtctccctctggaatttggtgcctcggctgaaacagttcgagttgaggaagaagaagaggaagactggctggatgatactactgagcaatcagagattgagccagaaccagaacctacacctgaagaaccagttaatcagtttactggttatttaaaacttactgacaatgttgccattaaatgtgttgacatcgttaaggaggcacaaagtgctaatcctatggtgattgtaaatgctgctaacatacacctgaaacatggtggtggtgtagcaggtgcactcaacaaggcaaccaatggtgccatgcaaaaggagagtgatgattacattaagctaaatggccctcttacagtaggagggtcttgtttgctttctggacataatcttgctaagaagtgtctgcatgttgttggacctaacctaaatgcaggtgaggacatccagcttcttaaggcagcatatgaaaatttcaattcacaggacatcttacttgcaccattgttgtcagcaggcatatttggtgctaaaccacttcagtctttacaagtgtgcgtgcagacggttcgtacacaggtttatattgcagtcaatgacaaagctctttatgagcaggttgtcatggattatcttgataacctgaagcctagagtggaagcacctaaacaagaggagccaccaaacacagaagattccaaaactgaggagaaatctgtcgtacagaagcctgtcgatgtgaagccaaaaattaaggcctgcattgatgaggttaccacaacactggaagaaactaagtttcttaccaataagttactcttgtttgctgatatcaatggtaagctttaccatgattctcagaacatgcttagaggtgaagatatgtctttccttgagaaggatgcaccttacatggtaggtgatgttatcactagtggtgatatcacttgtgttgtaataccctccaaaaaggctggtggcactactgagatgctctcaagagctttgaagaaagtgccagttgatgagtatataaccacgtaccctggacaaggatgtgctggttatacacttgaggaagctaagactgctcttaagaaatgcaaatctgcattttatgtactaccttcagaagcacctaatgctaaggaagagattctaggaactgtatcctggaatttgagagaaatgcttgctcatgctgaagagacaagaaaattaatgcctatatgcatggatgttagagccataatggcaaccatccaacgtaagtataaaggaattaaaattcaagagggcatcgttgactatggtgtccgattcttcttttatactagtaaagagcctgtagcttctattattacgaagctgaactctctaaatgagccgcttgtcacaatgccaattggttatgtgacacatggttttaatcttgaagaggctgcgcgctgtatgcgttctcttaaagctcctgccgtagtgtcagtatcatcaccagatgctgttactacatataatggatacctcacttcgtcatcaaagacatctgaggagcactttgtagaaacagtttctttggctggctcttacagagattggtcctattcaggacagcgtacagagttaggtgttgaatttcttaagcgtggtgacaaaattgtgtaccacactctggagagccccgtcgagtttcatcttgacggtgaggttctttcacttgacaaactaaagagtctcttatccctgcgggaggttaagactataaaagtgttcacaactgtggacaacactaatctccacacacagcttgtggatatgtctatgacatatggacagcagtttggtccaacatacttggatggtgctgatgttacaaaaattaaacctcatgtaaatcatgagggtaagactttctttgtactacctagtgatgacacactacgtagtgaagctttcgagtactaccatactcttgatgagagttttcttggtaggtacatgtctgctttaaaccacacaaagaaatggaaatttcctcaagttggtggtttaacttcaattaaatgggctgataacaattgttatttgtctagtgttttattagcacttcaacagcttgaagtcaaattcaatgcaccagcacttcaagaggcttattatagagcccgtgctggtgatgctgctaacttttgtgcactcatactcgcttacagtaataaaactgttggcgagcttggtgatgtcagagaaactatgacccatcttctacagcatgctaatttggaatctgcaaagcgagttcttaatgtggtgtgtaaacattgtggtcagaaaactactaccttaacgggtgtagaagctgtgatgtatatgggtactctatcttatgataatcttaagacaggtgtttccattccatgtgtgtgtggtcgtgatgctacacaatatctagtacaacaagagtcttcttttgttatgatgtctgcaccacctgctgagtataaattacagcaaggtacattcttatgtgcgaatgagtacactggtaactatcagtgtggtcattacactcatataactgctaaggagaccctctatcgtattgacggagctcaccttacaaagatgtcagagtacaaaggaccagtgactgatgttttctacaaggaaacatcttacactacaaccatcaagcctgtgtcgtataaactcgatggagttacttacacagagattgaaccaaaattggatgggtattataaaaaggataatgcttactatacagagcagcctatagaccttgtaccaactcaaccattaccaaatgcgagttttgataatttcaaactcacatgttctaacacaaaatttgctgatgatttaaatcaaatgacaggcttcacaaagccagcttcacgagagctatctgtcacattcttcccagacttgaatggcgatgtagtggctattgactatagacactattcagcgagtttcaagaaaggtgctaaattactgcataagccaattgtttggcacattaaccaggctacaaccaagacaacgttcaaaccaaacacttggtgtttacgttgtctttggagtacaaagccagtagatacttcaaattcatttgaagttctggcagtagaagacacacaaggaatggacaatcttgcttgtgaaagtcaacaacccacctctgaagaagtagtggaaaatcctaccatacagaaggaagtcatagagtgtgacgtgaaaactaccgaagttgtaggcaatgtcatacttaaaccatcagatgaaggtgttaaagtaacacaagagttaggtcatgaggatcttatggctgcttatgtggaaaacacaagcattaccattaagaaacctaatgagctttcactagccttaggtttaaaaacaattgccactcatggtattgctgcaattaatagtgttccttggagtaaaattttggcttatgtcaaaccattcttaggacaagcagcaattacaacatcaaattgcgctaagagattagcacaacgtgtgtttaacaattatatgccttatgtgtttacattattgttccaattgtgtacttttactaaaagtaccaattctagaattagagcttcactacctacaactattgctaaaaatagtgttaagagtgttgctaaattatgtttggatgccggcattaattatgtgaagtcacccaaattttctaaattgttcacaatcgctatgtggctattgttgttaagtatttgcttaggttctctaatctgtgtaactgctgcttttggtgtactcttatctaattttggtgctccttcttattgtaatggcgttagagaattgtatcttaattcgtctaacgttactactatggatttctgtgaaggttcttttccttgcagcatttgtttaagtggattagactcccttgattcttatccagctcttgaaaccattcaggtgacgatttcatcgtacaagctagacttgacaattttaggtctggccgctgagtgggttttggcatatatgttgttcacaaaattcttttatttattaggtctttcagctataatgcaggtgttctttggctattttgctagtcatttcatcagcaattcttggctcatgtggtttatcattagtattgtacaaatggcacccgtttctgcaatggttaggatgtacatcttctttgcttctttctactacatatggaagagctatgttcatatcatggatggttgcacctcttcgacttgcatgatgtgctataagcgcaatcgtgccacacgcgttgagtgtacaactattgttaatggcatgaagagatctttctatgtctatgcaaatggaggccgtggcttctgcaagactcacaattggaattgtctcaattgtgacacattttgcactggtagtacattcattagtgatgaagttgctcgtgatttgtcactccagtttaaaagaccaatcaaccctactgaccagtcatcgtatattgttgatagtgttgctgtgaaaaatggcgcgcttcacctctactttgacaaggctggtcaaaagacctatgagagacatccgctctcccattttgtcaatttagacaatttgagagctaacaacactaaaggttcactgcctattaatgtcatagtttttgatggcaagtccaaatgcgacgagtctgcttctaagtctgcttctgtgtactacagtcagctgatgtgccaacctattctgttgcttgaccaagctcttgtatcagacgttggagatagtactgaagtttccgttaagatgtttgatgcttatgtcgacaccttttcagcaacttttagtgttcctatggaaaaacttaaggcacttgttgctacagctcacagcgagttagcaaagggtgtagctttagatggtgtcctttctacattcgtgtcagctgcccgacaaggtgttgttgataccgatgttgacacaaaggatgttattgaatgtctcaaactttcacatcactctgacttagaagtgacaggtgacagttgtaacaatttcatgctcacctataataaggttgaaaacatgacgcccagagatcttggcgcatgtattgactgtaatgcaaggcatatcaatgcccaagtagcaaaaagtcacaatgtttcactcatctggaatgtaaaagactacatgtctttatctgaacagctgcgtaaacaaattcgtagtgctgccaagaagaacaacataccttttagactaacttgtgctacaactagacaggttgtcaatgtcataactactaaaatctcactcaagggtggtaagattgttagtacttgttttaaacttatgcttaaggccacattattgtgcgttcttgctgcattggtttgttatatcgttatgccagtacatacattgtcaatccatgatggttacacaaatgaaatcattggttacaaagccattcaggatggtgtcactcgtgacatcatttctactgatgattgttttgcaaataaacatgctggttttgacgcatggtttagccagcgtggtggttcatacaaaaatgacaaaagctgccctgtagtagctgctatcattacaagagagattggtttcatagtgcctggcttaccgggtactgtgctgagagcaatcaatggtgacttcttgcattttctacctcgtgtttttagtgctgttggcaacatttgctacacaccttccaaactcattgagtatagtgattttgctacctctgcttgcgttcttgctgctgagtgtacaatttttaaggatgctatgggcaaacctgtgccatattgttatgacactaatttgctagagggttctatttcttatagtgagcttcgtccagacactcgttatgtgcttatggatggttccatcatacagtttcctaacacttacctggagggttctgttagagtagtaacaacttttgatgctgagtactgtagacatggtacatgcgaaaggtcagaagtaggtatttgcctatctaccagtggtagatgggttcttaataatgagcattacagagctctatcaggagttttctgtggtgttgatgcgatgaatctcatagctaacatctttactcctcttgtgcaacctgtgggtgctttagatgtgtctgcttcagtagtggctggtggtattattgccatattggtgacttgtgctgcctactactttatgaaattcagacgtgtttttggtgagtacaaccatgttgttgctgctaatgcacttttgtttttgatgtctttcactatactctgtctggtaccagcttacagctttctgccgggagtctactcagtcttttacttgtacttgacattctatttcaccaatgatgtttcattcttggctcaccttcaatggtttgccatgttttctcctattgtgcctttttggataacagcaatctatgtattctgtatttctctgaagcactgccattggttctttaacaactatcttaggaaaagagtcatgtttaatggagttacatttagtaccttcgaggaggctgctttgtgtacctttttgctcaacaaggaaatgtacctaaaattgcgtagcgagacactgttgccacttacacagtataacaggtatcttgctctatataacaagtacaagtatttcagtggagccttagatactaccagctatcgtgaagcagcttgctgccacttagcaaaggctctaaatgactttagcaactcaggtgctgatgttctctaccaaccaccacagacatcaatcacttctgctgttctgcagagtggttttaggaaaatggcattcccgtcaggcaaagttgaagggtgcatggtacaagtaacctgtggaactacaactcttaatggattgtggttggatgacacagtatactgtccaagacatgtcatttgcacagcagaagacatgcttaatcctaactatgaagatctgctcattcgcaaatccaaccatagctttcttgttcaggctggcaatgttcaacttcgtgttattggccattctatgcaaaattgtctgcttaggcttaaagttgatacttctaaccctaagacacccaagtataaatttgtccgtatccaacctggtcaaacattttcagttctagcatgctacaatggttcaccatctggtgtttatcagtgtgccatgagacctaatcataccattaaaggttctttccttaatggatcatgtggtagtgttggttttaacattgattatgattgcgtgtctttctgctatatgcatcatatggagcttccaacaggagtacacgctggtactgacttagaaggtaaattctatggtccatttgttgacagacaaactgcacaggctgcaggtacagacacaaccataacattaaatgttttggcatggctgtatgctgctgttatcaatggtgataggtggtttcttaatagattcaccactactttgaatgactttaaccttgtggcaatgaagtacaactatgaacctttgacacaagatcatgttgacatattgggacctctttctgctcaaacaggaattgccgtcttagatatgtgtgctgctttgaaagagctgctgcagaatggtatgaatggtcgtactatccttggtagcactattttagaagatgagtttacaccatttgatgttgttagacaatgctctggtgttaccttccaaggtaagttcaagaaaattgttaagggcactcatcattggatgcttttaactttcttgacatcactattgattcttgttcaaagtacacagtggtcactgtttttctttgtttacgagaatgctttcttgccatttactcttggtattatggcaattgctgcatgtgctatgctgcttgttaagcataagcacgcattcttgtgcttgtttctgttaccttctcttgcaacagttgcttactttaatatggtctacatgcctgctagctgggtgatgcgtatcatgacatggcttgaattggctgacactagcttgtctggttataggcttaaggattgtgttatgtatgcttcagctttagttttgcttattctcatgacagctcgcactgtttatgatgatgctgctagacgtgtttggacactgatgaatgtcattacacttgtttacaaagtctactatggtaatgctttagatcaagctatttccatgtgggccttagttatttctgtaacctctaactattctggtgtcgttacgactatcatgtttttagctagagctatagtgtttgtgtgtgttgagtattacccattgttatttattactggcaacaccttacagtgtatcatgcttgtttattgtttcttaggctattgttgctgctgctactttggccttttctgtttactcaaccgttacttcaggcttactcttggtgtttatgactacttggtctctacacaagaatttaggtatatgaactcccaggggcttttgcctcctaagagtagtattgatgctttcaagcttaacattaagttgttgggtattggaggtaaaccatgtatcaaggttgctactgtacagtctaaaatgtctgacgtaaagtgcacatctgtggtactgctctcggttcttcaacaacttagagtagagtcatcttctaaattgtgggcacaatgtgtacaactccacaatgatattcttcttgcaaaagacacaactgaagctttcgagaagatggtttctcttttgtctgttttgctatccatgcagggtgctgtagacattaataggttgtgcgaggaaatgctcgataaccgtgctactcttcaggctattgcttcagaatttagttctttaccatcatatgccgcttatgccactgcccaggaggcctatgagcaggctgtagctaatggtgattctgaagtcgttctcaaaaagttaaagaaatctttgaatgtggctaaatctgagtttgaccgtgatgctgccatgcaacgcaagttggaaaagatggcagatcaggctatgacccaaatgtacaaacaggcaagatctgaggacaagagggcaaaagtaactagtgctatgcaaacaatgctcttcactatgcttaggaagcttgataatgatgcacttaacaacattatcaacaatgcgcgtgatggttgtgttccactcaacatcataccattgactacagcagccaaactcatggttgttgtccctgattatggtacctacaagaacacttgtgatggtaacacctttacatatgcatctgcactctgggaaatccagcaagttgttgatgcggatagcaagattgttcaacttagtgaaattaacatggacaattcaccaaatttggcttggcctcttattgttacagctctaagagccaactcagctgttaaactacagaataatgaactgagtccagtagcactacgacagatgtcctgtgcggctggtaccacacaaacagcttgtactgatgacaatgcacttgcctactataacaattcgaagggaggtaggtttgtgctggcattactatcagaccaccaagatctcaaatgggctagattccctaagagtgatggtacaggtacaatttacacagaactggaaccaccttgtaggtttgttacagacacaccaaaagggcctaaagtgaaatacttgtacttcatcaaaggcttaaacaacctaaatagaggtatggtgctgggcagtttagctgctacagtacgtcttcaggctggaaatgctacagaagtacctgccaattcaactgtgctttccttctgtgcttttgcagtagaccctgctaaagcatataaggattacctagcaagtggaggacaaccaatcaccaactgtgtgaagatgttgtgtacacacactggtacaggacaggcaattactgtaacaccagaagctaacatggaccaagagtcctttggtggtgcttcatgttgtctgtattgtagatgccacattgaccatccaaatcctaaaggattctgtgacttgaaaggtaagtacgtccaaatacctaccacttgtgctaatgacccagtgggttttacacttagaaacacagtctgtaccgtctgcggaatgtggaaaggttatggctgtagttgtgaccaactccgcgaacccttgatgcagtctgcggatgcatcaacgtttttaaacgggtttgcggtgtaagtgcagcccgtcttacaccgtgcggcacaggcactagtactgatgtcgtctacagggcttttgatatttacaacgaaaaagttgctggttttgcaaagttcctaaaaactaattgctgtcgcttccaggagaaggatgaggaaggcaatttattagactcttactttgtagttaagaggcatactatgtctaactaccaacatgaagagactatttataacttggttaaagattgtccagcggttgctgtccatgactttttcaagtttagagtagatggtgacatggtaccacatatatcacgtcagcgtctaactaaatacacaatggctgatttagtctatgctctacgtcattttgatgagggtaattgtgatacattaaaagaaatactcgtcacatacaattgctgtgatgatgattatttcaataagaaggattggtatgacttcgtagagaatcctgacatcttacgcgtatatgctaacttaggtgagcgtgtacgccaatcattattaaagactgtacaattctgcgatgctatgcgtgatgcaggcattgtaggcgtactgacattagataatcaggatcttaatgggaactggtacgatttcggtgatttcgtacaagtagcaccaggctgcggagttcctattgtggattcatattactcattgctgatgcccatcctcactttgactagggcattggctgctgagtcccatatggatgctgatctcgcaaaaccacttattaagtgggatttgctgaaatatgattttacggaagagagactttgtctcttcgaccgttattttaaatattgggaccagacataccatcccaattgtattaactgtttggatgataggtgtatccttcattgtgcaaactttaatgtgttattttctactgtgtttccacctacaagttttggaccactagtaagaaaaatatttgtagatggtgttccttttgttgtttcaactggataccattttcgtgagttaggagtcgtacataatcaggatgtaaacttacatagctcgcgtctcagtttcaaggaacttttagtgtatgctgctgatccagctatgcatgcagcttctggcaatttattgctagataaacgcactacatgcttttcagtagctgcactaacaaacaatgttgcttttcaaactgtcaaacccggtaattttaataaagacttttatgactttgctgtgtctaaaggtttctttaaggaaggaagttctgttgaactaaaacacttcttctttgctcaggatggcaacgctgctatcagtgattatgactattatcgttataatctgccaacaatgtgtgatatcagacaactcctattcgtagttgaagttgttgataaatactttgattgttacgatggtggctgtattaatgccaaccaagtaatcgttaacaatctggataaatcagctggtttcccatttaataaatggggtaaggctagactttattatgactcaatgagttatgaggatcaagatgcacttttcgcgtatactaagcgtaatgtcatccctactataactcaaatgaatcttaagtatgccattagtgcaaagaatagagctcgcaccgtagctggtgtctctatctgtagtactatgacaaatagacagtttcatcagaaattattgaagtcaatagccgccactagaggagctactgtggtaattggaacaagcaagttttacggtggctggcataatatgttaaaaactgtttacagtgatgtagaaactccacaccttatgggttgggattatccaaaatgtgacagagccatgcctaacatgcttaggataatggcctctcttgttcttgctcgcaaacataacacttgctgtaacttatcacaccgtttctacaggttagctaacgagtgtgcgcaagtattaagtgagatggtcatgtgtggcggctcactatatgttaaaccaggtggaacatcatccggtgatgctacaactgcttatgctaatagtgtctttaacatttgtcaagctgttacagccaatgtaaatgcacttctttcaactgatggtaataagatagctgacaagtatgtccgcaatctacaacacaggctctatgagtgtctctatagaaatagggatgttgatcatgaattcgtggatgagttttacgcttacctgcgtaaacatttctccatgatgattctttctgatgatgccgttgtgtgctataacagtaactatgcggctcaaggtttagtagctagcattaagaactttaaggcagttctttattatcaaaataatgtgttcatgtctgaggcaaaatgttggactgagactgaccttactaaaggacctcacgaattttgctcacagcatacaatgctagttaaacaaggagatgattacgtgtacctgccttacccagatccatcaagaatattaggcgcaggctgttttgtcgatgatattgtcaaaacagatggtacacttatgattgaaaggttcgtgtcactggctattgatgcttacccacttacaaaacatcctaatcaggagtatgctgatgtctttcacttgtatttacaatacattagaaagttacatgatgagcttactggccacatgttggacatgtattccgtaatgctaactaatgataacacctcacggtactgggaacctgagttttatgaggctatgtacacaccacatacagtcttgcaggctgtaggtgcttgtgtattgtgcaattcacagacttcacttcgttgcggtgcctgtattaggagaccattcctatgttgcaagtgctgctatgaccatgtcatttcaacatcacacaaattagtgttgtctgttaatccctatgtttgcaatgccccaggttgtgatgtcactgatgtgacacaactgtatctaggaggtatgagctattattgcaagtcacataagcctcccattagttttccattatgtgctaatggtcaggtttttggtttatacaaaaacacatgtgtaggcagtgacaatgtcactgacttcaatgcgatagcaacatgtgattggactaatgctggcgattacatacttgccaacacttgtactgagagactcaagcttttcgcagcagaaacgctcaaagccactgaggaaacatttaagctgtcatatggtattgccactgtacgcgaagtactctctgacagagaattgcatctttcatgggaggttggaaaacctagaccaccattgaacagaaactatgtctttactggttaccgtgtaactaaaaatagtaaagtacagattggagagtacacctttgaaaaaggtgactatggtgatgctgttgtgtacagaggtactacgacatacaagttgaatgttggtgattactttgtgttgacatctcacactgtaatgccacttagtgcacctactctagtgccacaagagcactatgtgagaattactggcttgtacccaacactcaacatctcagatgagttttctagcaatgttgcaaattatcaaaaggtcggcatgcaaaagtactctacactccaaggaccacctggtactggtaagagtcattttgccatcggacttgctctctattacccatctgctcgcatagtgtatacggcatgctctcatgcagctgttgatgccctatgtgaaaaggcattaaaatatttgcccatagataaatgtagtagaatcatacctgcgcgtgcgcgcgtagagtgttttgataaattcaaagtgaattcaacactagaacagtatgttttctgcactgtaaatgcattgccagaaacaactgctgacattgtagtctttgatgaaatctctatggctactaattatgacttgagtgttgtcaatgctagacttcgtgcaaaacactacgtctatattggcgatcctgctcaattaccagccccccgcacattgctgactaaaggcacactagaaccagaatattttaattcagtgtgcagacttatgaaaacaataggtccagacatgttccttggaacttgtcgccgttgtcctgctgaaattgttgacactgtgagtgctttagtttatgacaataagctaaaagcacacaaggataagtcagctcaatgcttcaaaatgttctacaaaggtgttattacacatgatgtttcatctgcaatcaacagacctcaaataggcgttgtaagagaatttcttacacgcaatcctgcttggagaaaagctgtttttatctcaccttataattcacagaacgctgtagcttcaaaaatcttaggattgcctacgcagactgttgattcatcacagggttctgaatatgactatgtcatattcacacaaactactgaaacagcacactcttgtaatgtcaaccgcttcaatgtggctatcacaagggcaaaaattggcattttgtgcataatgtctgatagagatctttatgacaaactgcaatttacaagtctagaaataccacgtcgcaatgtggctacattacaagcagaaaatgtaactggactttttaaggactgtagtaagatcattactggtcttcatcctacacaggcacctacacacctcagcgttgatataaagttcaagactgaaggattatgtgttgacataccaggcataccaaaggacatgacctaccgtagactcatctctatgatgggtttcaaaatgaattaccaagtcaatggttaccctaatatgtttatcacccgcgaagaagctattcgtcacgttcgtgcgtggattggctttgatgtagagggctgtcatgcaactagagatgctgtgggtactaacctacctctccagctaggattttctacaggtgttaacttagtagctgtaccgactggttatgttgacactgaaaataacacagaattcaccagagttaatgcaaaacctccaccaggtgaccagtttaaacatcttataccactcatgtataaaggcttgccctggaatgtagtgcgtattaagatagtacaaatgctcagtgatacactgaaaggattgtcagacagagtcgtgttcgtcctttgggcgcatggctttgagcttacatcaatgaagtactttgtcaagattggacctgaaagaacgtgttgtctgtgtgacaaacgtgcaacttgcttttctacttcatcagatacttatgcctgctggaatcattctgtgggttttgactatgtctataacccatttatgattgatgttcagcagtggggctttacgggtaaccttcagagtaaccatgaccaacattgccaggtacatggaaatgcacatgtggctagttgtgatgctatcatgactagatgtttagcagtccatgagtgctttgttaagcgcgttgattggtctgttgaataccctattataggagatgaactgagggttaattctgcttgcagaaaagtacaacacatggttgtgaagtctgcattgcttgctgataagtttccagttcttcatgacattggaaatccaaaggctatcaagtgtgtgcctcaggctgaagtagaatggaagttctacgatgctcagccatgtagtgacaaagcttacaaaatagaggaactcttctattcttatgctacacatcacgataaattcactgatggtgtttgtttgttttggaattgtaacgttgatcgttacccagccaatgcaattgtgtgtaggtttgacacaagagtcttgtcaaacttgaacttaccaggctgtgatggtggtagtttgtatgtgaataagcatgcattccacactccagctttcgataaaagtgcatttactaatttaaagcaattgcctttcttttactattctgatagtccttgtgagtctcatggcaaacaagtagtgtcggatattgattatgttccactcaaatctgctacgtgtattacacgatgcaatttaggtggtgctgtttgcagacaccatgcaaatgagtaccgacagtacttggatgcatataatatgatgatttctgctggatttagcctatggatttacaaacaatttgatacttataacctgtggaatacatttaccaggttacagagtttagaaaatgtggcttataatgttgttaataaaggacactttgatggacacgccggcgaagcacctgtttccatcattaataatgctgtttacacaaaggtagatggtattgatgtggagatctttgaaaataagacaacacttcctgttaatgttgcatttgagctttgggctaagcgtaacattaaaccagtgccagagattaagatactcaataatttgggtgttgatatcgctgctaatactgtaatctgggactacaaaagagaagccccagcacatgtatctacaataggtgtctgcacaatgactgacattgccaagaaacctactgagagtgcttgttcttcacttactgtcttgtttgatggtagagtggaaggacaggtagacctttttagaaacgcccgtaatggtgttttaataacagaaggttcagtcaaaggtctaacaccttcaaagggaccagcacaagctagcgtcaatggagtcacattaattggagaatcagtaaaaacacagtttaactactttaagaaagtagacggcattattcaacagttgcctgaaacctactttactcagagcagagacttagaggattttaagcccagatcacaaatggaaactgactttctcgagctcgctatggatgaattcatacagcgatataagctcgagggctatgccttcgaacacatcgtttatggagatttcagtcatggacaacttggcggtcttcatttaatgataggcttagccaagcgctcacaagattcaccacttaaattagaggattttatccctatggacagcacagtgaaaaattacttcataacagatgcgcaaacaggttcatcaaaatgtgtgtgttctgtgattgatcttttacttgatgactttgtcgagataataaagtcacaagatttgtcagtgatttcaaaagtggtcaaggttacaattgactatgctgaaatttcattcatgctttggtgtaaggatggacatgttgaaaccttctacccaaaactacaagcaagtcaagcgtggcaaccaggtgttgcgatgcctaacttgtacaagatgcaaagaatgcttcttgaaaagtgtgaccttcagaattatggtgaaaatgctgttataccaaaaggaataatgatgaatgtcgcaaagtatactcaactgtgtcaatacttaaatacacttactttagctgtaccctacaacatgagagttattcactttggtgctggctctgataaaggagttgcaccaggtacagctgtgctcagacaatggttgccaactggcacactacttgtcgattcagatcttaatgacttcgtctccgacgcagattctactttaattggagactgtgcaacagtacatacggctaataaatgggaccttattattagcgatatgtatgaccctaggaccaaacatgtgacaaaagagaatgactctaaagaagggtttttcacttatctgtgtggatttataaagcaaaaactagccctgggtggttctatagctgtaaagataacagagcattcttggaatgctgacctttacaagcttatgggccatttctcatggtggacagcttttgttacaaatgtaaatgcatcatcatcggaagcatttttaattggggctaactatcttggcaagccgaaggaacaaattgatggctataccatgcatgctaactacattttctggaggaacacaaatcctatccagttgtcttcctattcactctttgacatgagcaaatttcctcttaaattaagaggaactgctgtaatgtctcttaaggagaatcaaatcaatgatatgatttattctcttctggaaaaaggtaggcttatcattagagaaaacaacagagttgtggtttcaagtgatattcttgttaacaactaaacgaacatgtttattttcttattatttcttactctcactagtggtagtgaccttgaccggtgcaccacttttgatgatgttcaagctcctaattacactcaacatacttcatctatgaggggggtttactatcctgatgaaatttttagatcagacactctttatttaactcaggatttatttcttccattttattctaatgttacagggtttcatactattaatcatacgtttggcaaccctgtcataccttttaaggatggtatttattttgctgccacagagaaatcaaatgttgtccgtggttgggtttttggttctaccatgaacaacaagtcacagtcggtgattattattaacaattctactaatgttgttatacgagcatgtaactttgaattgtgtgacaaccctttctttgctgtttctaaacccatgggtacacagacacatactatgatattcgataatgcatttaattgcactttcgagtacatatctgatgccttttcgcttgatgtttcagaaaagtcaggtaattttaaacacttacgagagtttgtgtttaaaaataaagatgggtttctctatgtttataagggctatcaacctatagatgtagttcgtgatctaccttctggttttaacactttgaaacctatttttaagttgcctcttggtattaacattacaaattttagagccattcttacagccttttcacctgctcaagacatttggggcacgtcagctgcagcctattttgttggctatttaaagccaactacatttatgctcaagtatgatgaaaatggtacaatcacagatgctgttgattgttctcaaaatccacttgctgaactcaaatgctctgttaagagctttgagattgacaaaggaatttaccagacctctaatttcagggttgttccctcaggagatgttgtgagattccctaatattacaaacttgtgtccttttggagaggtttttaatgctactaaattcccttctgtctatgcatgggagagaaaaaaaatttctaattgtgttgctgattactctgtgctctacaactcaacatttttttcaacctttaagtgctatggcgtttctgccactaagttgaatgatctttgcttctccaatgtctatgcagattcttttgtagtcaagggagatgatgtaagacaaatagcgccaggacaaactggtgttattgctgattataattataaattgccagatgatttcatgggttgtgtccttgcttggaatactaggaacattgatgctacttcaactggtaattataattataaatataggtatcttagacatggcaagcttaggccctttgagagagacatatctaatgtgcctttctcccctgatggcaaaccttgcaccccacctgctcttaattgttattggccattaaatgattatggtttttacaccactactggcattggctaccaaccttacagagttgtagtactttcttttgaacttttaaatgcaccggccacggtttgtggaccaaaattatccactgaccttattaagaaccagtgtgtcaattttaattttaatggactcactggtactggtgtgttaactccttcttcaaagagatttcaaccatttcaacaatttggccgtgatgtttctgatttcactgattccgttcgagatcctaaaacatctgaaatattagacatttcaccttgctcttttgggggtgtaagtgtaattacacctggaacaaatgcttcatctgaagttgctgttctatatcaagatgttaactgcactgatgtttctacagcaattcatgcagatcaactcacaccagcttggcgcatatattctactggaaacaatgtattccagactcaagcaggctgtcttataggagctgagcatgtcgacacttcttatgagtgcgacattcctattggagctggcatttgtgctagttaccatacagtttctttattacgtagtactagccaaaaatctattgtggcttatactatgtctttaggtgctgatagttcaattgcttactctaataacaccattgctatacctactaacttttcaattagcattactacagaagtaatgcctgtttctatggctaaaacctccgtagattgtaatatgtacatctgcggagattctactgaatgtgctaatttgcttctccaatatggtagcttttgcacacaactaaatcgtgcactctcaggtattgctgctgaacaggatcgcaacacacgtgaagtgttcgctcaagtcaaacaaatgtacaaaaccccaactttgaaatattttggtggttttaatttttcacaaatattacctgaccctctaaagccaactaagaggtcttttattgaggacttgctctttaataaggtgacactcgctgatgctggcttcatgaagcaatatggcgaatgcctaggtgatattaatgctagagatctcatttgtgcgcagaagttcaatggacttacagtgttgccacctctgctcactgatgatatgattgctgcctacactgctgctctagttagtggtactgccactgctggatggacatttggtgctggcgctgctcttcaaataccttttgctatgcaaatggcatataggttcaatggcattggagttacccaaaatgttctctatgagaaccaaaaacaaatcgccaaccaatttaacaaggcgattagtcaaattcaagaatcacttacaacaacatcaactgcattgggcaagctgcaagacgttgttaaccagaatgctcaagcattaaacacacttgttaaacaacttagctctaattttggtgcaatttcaagtgtgctaaatgatatcctttcgcgacttgataaagtcgaggcggaggtacaaattgacaggttaattacaggcagacttcaaagccttcaaacctatgtaacacaacaactaatcagggctgctgaaatcagggcttctgctaatcttgctgctactaaaatgtctgagtgtgttcttggacaatcaaaaagagttgacttttgtggaaagggctaccaccttatgtccttcccacaagcagccccgcatggtgttgtcttcctacatgtcacgtatgtgccatcccaggagaggaacttcaccacagcgccagcaatttgtcatgaaggcaaagcatacttccctcgtgaaggtgtttttgtgtttaatggcacttcttggtttattacacagaggaacttcttttctccacaaataattactacagacaatacatttgtctcaggaaattgtgatgtcgttattggcatcattaacaacacagtttatgatcctctgcaacctgagcttgactcattcaaagaagagctggacaagtacttcaaaaatcatacatcaccagatgttgatcttggcgacatttcaggcattaacgcttctgtcgtcaacattcaaaaagaaattgaccgcctcaatgaggtcgctaaaaatttaaatgaatcactcattgaccttcaagaattgggaaaatatgagcaatatattaaatggccttggtatgtttggctcggcttcattgctggactaattgccatcgtcatggttacaatcttgctttgttgcatgactagttgttgcagttgcctcaagggtgcatgctcttgtggttcttgctgcaagtttgatgaggatgactctgagccagttctcaagggtgtcaaattacattacacataaacgaacttatggatttgtttatgagattttttactcttggatcaattactgcacagccagtaaaaattgacaatgcttctcctgcaagtactgttcatgctacagcaacgataccgctacaagcctcactccctttcggatggcttgttattggcgttgcatttcttgctgtttttcagagcgctaccaaaataattgcgctcaataaaagatggcagctagccctttataagggcttccagttcatttgcaatttactgctgctatttgttaccatctattcacatcttttgcttgtcgctgcaggtatggaggcgcaatttttgtacctctatgccttgatatattttctacaatgcatcaacgcatgtagaattattatgagatgttggctttgttggaagtgcaaatccaagaacccattactttatgatgccaactactttgtttgctggcacacacataactatgactactgtataccatataacagtgtcacagatacaattgtcgttactgaaggtgacggcatttcaacaccaaaactcaaagaagactaccaaattggtggttattctgaggataggcactcaggtgttaaagactatgtcgttgtacatggctatttcaccgaagtttactaccagcttgagtctacacaaattactacagacactggtattgaaaatgctacattcttcatctttaacaagcttgttaaagacccaccgaatgtgcaaatacacacaatcgacggctcttcaggagttgctaatccagcaatggatccaatttatgatgagccgacgacgactactagcgtgcctttgtaagcacaagaaagtgagtacgaacttatgtactcattcgtttcggaagaaacaggtacgttaatagttaatagcgtacttctttttcttgctttcgtggtattcttgctagtcacactagccatccttactgcgcttcgattgtgtgcgtactgctgcaatattgttaacgtgagtttagtaaaaccaacggtttacgtctactcgcgtgttaaaaatctgaactcttctgaaggagttcctgatcttctggtctaaacgaactaactattattattattctgtttggaactttaacattgcttatcatggcagacaacggtactattaccgttgaggagcttaaacaactcctggaacaatggaacctagtaataggtttcctattcctagcctggattatgttactacaatttgcctattctaatcggaacaggtttttgtacataataaagcttgttttcctctggctcttgtggccagtaacacttgcttgttttgtgcttgctgctgtctacagaattaattgggtgactggcgggattgcgattgcaatggcttgtattgtaggcttgatgtggcttagctacttcgttgcttccttcaggctgtttgctcgtacccgctcaatgtggtcattcaacccagaaacaaacattcttctcaatgtgcctctccgggggacaattgtgaccagaccgctcatggaaagtgaacttgtcattggtgctgtgatcattcgtggtcacttgcgaatggccggacactccctagggcgctgtgacattaaggacctgccaaaagagatcactgtggctacatcacgaacgctttcttattacaaattaggagcgtcgcagcgtgtaggcactgattcaggttttgctgcatacaaccgctaccgtattggaaactataaattaaatacagaccacgccggtagcaacgacaatattgctttgctagtacagtaagtgacaacagatgtttcatcttgttgacttccaggttacaatagcagagatattgattatcattatgaggactttcaggattgctatttggaatcttgacgttataataagttcaatagtgagacaattatttaagcctctaactaagaagaattattcggagttagatgatgaagaacctatggagttagattatccataaaacgaacatgaaaattattctcttcctgacattgattgtatttacatcttgcgagctatatcactatcaggagtgtgttagaggtacgactgtactactaaaagaaccttgcccatcaggaacatacgagggcaattcaccatttcaccctcttgctgacaataaatttgcactaacttgcactagcacacactttgcttttgcttgtgctgacggtactcgacatacctatcagctgcgtgcaagatcagtttcaccaaaacttttcatcagacaagaggaggttcaacaagagctctactcgccactttttctcattgttgctgctctagtatttttaatactttgcttcaccattaagagaaagacagaatgaatgagctcactttaattgacttctatttgtgctttttagcctttctgctattccttgttttaataatgcttattatattttggttttcactcgaaatccaggatctagaagaaccttgtaccaaagtctaaacgaacatgaaacttctcattgttttgacttgtatttctctatgcagttgcatatgcactgtagtacagcgctgtgcatctaataaacctcatgtgcttgaagatccttgtaaggtacaacactaggggtaatacttatagcactgcttggctttgtgctctaggaaaggttttaccttttcatagatggcacactatggttcaaacatgcacacctaatgttactatcaactgtcaagatccagctggtggtgcgcttatagctaggtgttggtaccttcatgaaggtcaccaaactgctgcatttagagacgtacttgttgttttaaataaacgaacaaattaaaatgtctgataatggaccccaatcaaaccaacgtagtgccccccgcattacatttggtggacccacagattcaactgacaataaccagaatggaggacgcaatggggcaaggccaaaacagcgccgaccccaaggtttacccaataatactgcgtcttggttcacagctctcactcagcatggcaaggaggaacttagattccctcgaggccagggcgttccaatcaacaccaatagtggtccagatgaccaaattggctactaccgaagagctacccgacgagttcgtggtggtgacggcaaaatgaaagagctcagccccagatggtacttctattacctaggaactggcccagaagcttcacttccctacggcgctaacaaagaaggcatcgtatgggttgcaactgagggagccttgaatacacccaaagaccacattggcacccgcaatcctaataacaatgctgccaccgtgctacaacttcctcaaggaacaacattgccaaaaggcttctacgcagagggaagcagaggcggcagtcaagcctcttctcgctcctcatcacgtagtcgcggtaattcaagaaattcaactcctggcagcagtaggggaaattctcctgctcgaatggctagcggaggtggtgaaactgccctcgcgctattgctgctagacagattgaaccagcttgagagcaaagtttctggtaaaggccaacaacaacaaggccaaactgtcactaagaaatctgctgctgaggcatctaaaaagcctcgccaaaaacgtactgccacaaaacagtacaacgtcactcaagcatttgggagacgtggtccagaacaaacccaaggaaatttcggggaccaagacctaatcagacaaggaactgattacaaacattggccgcaaattgcacaatttgctccaagtgcctctgcattctttggaatgtcacgcattggcatggaagtcacaccttcgggaacatggctgacttatcatggagccattaaattggatgacaaagatccacaattcaaagacaacgtcatactgctgaacaagcacattgacgcatacaaaacattcccaccaacagagcctaaaaaggacaaaaagaaaaagactgatgaagctcagcctttgccgcagagacaaaagaagcagcccactgtgactcttcttcctgcggctgacatggatgatttctccagacaacttcaaaattccatgagtggagcttctgctgattcaactcaggcataaacactcatgatgaccacacaaggcagatgggctatgtaaacgttttcgcaattccgtttacgatacatagtctactcttgtgcagaatgaattctcgtaactaaacagcacaagtaggtttagttaactttaatctcacatagcaatctttaatcaatgtgtaacattagggaggacttgaaagagccaccacattttcatcgaggccacgcggagtacgatcgagggtacagtgaataatgctagggagagctgcctatatggaagagccctaatgtgtaaaattaattttagtagtgctatccccatgtgattttaatagcttcttaggagaatgacaa

SEQ ID NO: 77 - DNA, 29725 bp, Coronavirus
atattaggtttttacctacccaggaaaagccaaccaacctcgatctcttgtagatctgttctctaaacgaactttaaaatctgtgtagctgtcgctcggctgcatgcctagtgcacctacgcagtataaacaataataaattttactgtcgttgacaagaaacgagtaactcgtccctcttctgcagactgcttacggtttcgtccgtgttgcagtcgatcatcagcatacctaggtttcgtccgggtgtgaccgaaaggtaagatggagagccttgttcttggtgtcaacgagaaaacacacgtccaactcagtttgcctgtccttcaggttagagacgtgctagtgcgtggcttcggggactctgtggaagaggccctatcggaggcacgtgaacacctcaaaaatggcacttgtggtctagtagagctggaaaaaggcgtactgccccagcttgaacagccctatgtgttcattaaacgttctgatgccttaagcaccaatcacggccacaaggtcgttgagctggttgcagaaatggacggcattcagtacggtcgtagcggtataacactgggagtactcgtgccacatgtgggcgaaaccccaattgcataccgcaatgttcttcttcgtaagaacggtaataagggagccggtggtcatagctatggcatcgatctaaagtcttatgacttaggtgacgagcttggcactgatcccattgaagattatgaacaaaactggaacactaagcatggcagtggtgcactccgtgaactcactcgtgagctcaatggaggtgcagtcactcgctatgtcgacaacaatttctgtggcccagatgggtaccctcttgattgcatcaaagattttctcgcacgcgcgggcaagtcaatgtgcactctttccgaacaacttgattacatcgagtcgaagagaggtgtctactgctgccgtgaccatgagcatgaaattgcctggttcactgagcgctctgataagagctacgagcaccagacacccttcgaaattaagagtgccaagaaatttgacactttcaaaggggaatgcccaaagtttgtgtttcctcttaactcaaaagtcaaagtcattcaaccacgtgttgaaaagaaaaagactgagggtttcatggggcgtatacgctctgtgtaccctgttgcatctccacaggagtgtaacaatatgcacttgtctaccttgatgaaatgtaatcattgcgatgaagtttcatggcagacgtgcgactttctgaaagccacttgtgaacattgtggcactgaaaatttagttattgaaggacctactacatgtgggtacctacctactaatgctgtagtgaaaatgccatgtcctgcctgtcaagacccagagattggacctgagcatagtgttgcagattatcacaaccactcaaacattgaaactcgactccgcaagggaggtaggactagatgttttggaggctgtgtgtttgcctatgttggctgctataataagcgtgcctactgggttcctcgtgctagtgctgatattggctcaggccatactggcattactggtgacaatgtggagaccttgaatgaggatctccttgagatactgagtcgtgaacgtgttaacattaacattgttggcgattttcatttgaatgaagaggttgccatcattttggcatctttctctgcttctacaagtgcctttattgacactataaagagtcttgattacaagtctttcaaaaccattgttgagtcctgcggtaactataaagttaccaagggaaagcccgtaaaaggtgcttggaacattggacaacagagatcagttttaacaccactgtgtggttttccctcacaggctgctggtgttatcagatcaatttttgcgcgcacacttgatgcagcaaaccactcaattcctgatttgcaaagagcagctgtcaccatacttgatggtatttctgaacagtcattacgtcttgtcgacgccatggtttatacttcagacctgctcaccaacagtgtcattattatggcatatgtaactggtggtcttgtacaacagacttctcagtggttgtctaatcttttgggcactactgttgaaaaactcaggcctatctttgaatggattgaggcgaaacttagtgcaggagttgaatttctcaaggatgcttgggagattctcaaatttctcattacaggtgtttttgacatcgtcaagggtcaaatacaggttgcttcagataacatcaaggattgtgtaaaatgcttcattgatgttgttaacaaggcactcgaaatgtgcattgatcaagtcactatcgctggcgcaaagttgcgatcactcaacttaggtgaagtcttcatcgctcaaagcaagggactttaccgtcagtgtatacgtggcaaggagcagctgcaactactcatgcctcttaaggcaccaaaagaagtaacctttcttgaaggtgattcacatgacacagtacttacctctgaggaggttgttctcaagaacggtgaactcgaagcactcgagacgcccgttgatagcttcacaaatggagctatcgttggcacaccagtctgtgtaaatggcctcatgctcttagagattaaggacaaagaacaatactgcgcattgtctcctggtttactggctacaaacaatgtctttcgcttaaaagggggtgcaccaattaaaggtgtaacctttggagaagatactgtttgggaagttcaaggttacaagaatgtgagaatcacatttgagcttgatgaacgtgttgacaaagtgcttaatgaaaagtgctctgtctacactgttgaatccggtaccgaagttactgagtttgcatgtgttgtagcagaggctgttgtgaagactttacaaccagtttctgatctccttaccaacatgggtattgatcttgatgagtggagtgtagctacattctacttatttgatgatgctggtgaagaaaacttttcatcacgtatgtattgttccttttaccctccagatgaggaagaagaggacgatgcagagtgtgaggaagaagaaattgatgaaacctgtgaacatgagtacggtacagaggatgattatcaaggtctccctctggaatttggtgcctcagctgaaacagttcgagttgaggaagaagaagaggaagactggctggatgatactactgagcaatcagagattgagccagaaccagaacctacacctgaagaaccagttaatcagtttactggttatttaaaacttactgacaatgttgccattaaatgtgttgacatcgttaaggaggcacaaagtgctaatcctatggtgattgtaaatgctgctaacatacacctgaaacatggtggtggtgtagcaggtgcactcaacaaggcaaccaatggtgccatgcaaaaggagagtgatgattacattaagctaaatggccctcttacagtaggagggtcttgtttgctttctggacataatcttgctaagaagtgtctgcatgttgttggacctaacctaaatgcaggtgaggacatccagcttcttaaggcagcatatgaaaatttcaattcacaggacatcttacttgcaccattgttgtcagcaggcatatttggtgctaaaccacttcagtctttacaagtgtgcgtgcagacggttcgtacacaggtttatattgcagtcaatgacaaagctctttatgagcaggttgtcatggattatcttgataacctgaagcctagagtggaagcacctaaacaagaggagccaccaaacacagaagattccaaaactgaggagaaatctgtcgtacagaagcctgtcgatgtgaagccaaaaattaaggcctgcattgatgaggttaccacaacactggaagaaactaagtttcttaccaataagttactcttgtttgctgatatcaatggtaagctttaccatgattctcagaacatgcttagaggtgaagatatgtctttccttgagaaggatgcaccttacatggtaggtgatgttatcactagtggtgatatcacttgtgttgtaataccctccaaaaaggctggtggcactactgagatgctctcaagagctttgaagaaagtgccagttgatgagtatataaccacgtaccctggacaaggatgtgctggttatacacttgaggaagctaagactgctcttaagaaatgcaaatctgcattttatgtactaccttcagaagcacctaatgctaaggaagagattctaggaactgtatcctggaatttgagagaaatgcttgctcatgctgaagagacaagaaaattaatgcctatatgcatggatgttagagccataatggcaaccatccaacgtaagtataaaggaattaaaattcaagagggcatcgttgactatggtgtccgattcttcttttatactagtaaagagcctgtagcttctattattacgaagctgaactctctaaatgagccgcttgtcacaatgccaattggttatgtgacacatggttttaatcttgaagaggctgcgcgctgtatgcgttctcttaaagctcctgccgtagtgtcagtatcatcaccagatgctgttactacatataatggatacctcacttcgtcatcaaagacatctgaggagcactttgtagaaacagtttctttggctggctcttacagagattggtcctattcaggacagcgtacagagttaggtgttgaatttcttaagcgtggtgacaaaattgtgtaccacactctggagagccccgtcgagtttcatcttgacggtgaggttctttcacttgacaaactaaagagtctcttatccctgcgggaggttaagactataaaagtgttcacaactgtggacaacactaatctccacacacagcttgtggatatgtctatgacatatggacagcagtttggtccaacatacttggatggtgctgatgttacaaaaattaaacctcatgtaaatcatgagggtaagactttctttgtactacctagtgatgacacactacgtagtgaagctttcgagtactaccatactcttgatgagagttttcttggtaggtacatgtctgctttaaaccacacaaagaaatggaaatttcctcaagttggtggtttaacttcaattaaatgggctgataacaattgttatttgtctagtgttttattagcacttcaacagcttgaagtcaaattcaatgcaccagcacttcaagaggcttattatagagcccgtgctggtgatgctgctaacttttgtgcactcatactcgcttacagtaataaaactgttggcgagcttggtgatgtcagagaaactatgacccatcttctacagcatgctaatttggaatctgcaaagcgagttcttaatgtggtgtgtaaacattgtggtcagaaaactactaccttaacgggtgtagaagctgtgatgtatatgggtactctatcttatgataatcttaagacaggtgtttccattccatgtgtgtgtggtcgtgatgctacacaatatctagtacaacaagagtcttcttttgttatgatgtctgcaccacctgctgagtataaattacagcaaggtacattcttatgtgcgaatgagtacactggtaactatcagtgtggtcattacactcatataactgctaaggagaccctctatcgtattgacggagctcaccttacaaagatgtcagagtacaaaggaccagtgactgatgttttctacaaggaaacatcttacactacaaccatcaagcctgtgtcgtataaactcgatggagttacttacacagagattgaaccaaaattggatgggtattataaaaaggataatgcttactatacagagcagcctatagaccttgtaccaactcaaccattaccaaatgcgagttttgataatttcaaactcacatgttctaacacaaaatttgctgatgatttaaatcaaatgacaggcttcacaaagccagcttcacgagagctatctgtcacattcttcccagacttgaatggcgatgtagtggctattgactatagacactattcagcgagtttcaagaaaggtgctaaattactgcataagccaattgtttggcacattaaccaggctacaaccaagacaacgttcaaaccaaacacttggtgtttacgttgtctttggagtacaaagccagtagatacttcaaattcatttgaagttctggcagtagaagacacacaaggaatggacaatcttgcttgtgaaagtcaacaacccacctctgaagaagtagtggaaaatcctaccatacagaaggaagtcatagagtgtgacgtgaaaactaccgaagttgtaggcaatgtcatacttaaaccatcagatgaaggtgttaaagtaacacaagagttaggtcatgaggatcttatggctgcttatgtggaaaacacaagcattaccattaagaaacctaatgagctttcactagccttaggtttaaaaacaattgccactcatggtattgctgcaattaatagtgttccttggagtaaaattttggcttatgtcaaaccattcttaggacaagcagcaattacaacatcaaattgcgctaagagattagcacaacgtgtgtttaacaattatatgccttatgtgtttacattattgttccaattgtgtacttttactaaaagtaccaattctagaattagagcttcactacctacaactattgctaaaaatagtgttaagagtgttgctaaattatgtttggatgccggcattaattatgtgaagtcacccaaattttctaaattgttcacaatcgctatgtggctattgttgttaagtatttgcttaggttctctaatctgtgtaactgctgcttttggtgtactcttatctaattttggtgctccttcttattgtaatggcgttagagaattgtatcttaattcgtctaacgttactactatggatttctgtgaaggttcttttccttgcagcatttgtttaagtggattagactcccttgattcttatccagctcttgaaaccattcaggtgacgatttcatcgtacaagctagacttgacaattttaggtctggccgctgagtgggttttggcatatatgttgttcacaaaattcttttatttattaggtctttcagctataatgcaggtgttctttggctattttgctagtcatttcatcagcaattcttggctcatgtggtttatcattagtattgtacaaatggcacccgtttctgcaatggttaggatgtacatcttctttgcttctttctactacatatggaagagctatgttcatatcatggatggttgcacctcttcgacttgcatgatgtgctataagcgcaatcgtgccacacgcgttgagtgtacaactattgttaatggcatgaagagatctttctatgtctatgcaaatggaggccgtggcttctgcaagactcacaattggaattgtctcaattgtgacacattttgcactggtagtacattcattagtgatgaagttgctcgtgatttgtcactccagtttaaaagaccaatcaaccctactgaccagtcatcgtatattgttgatagtgttgctgtgaaaaatggcgcgcttcacctctactttgacaaggctggtcaaaagacctatgagagacatccgctctcccattttgtcaatttagacaatttgagagctaacaacactaaaggttcactgcctattaatgtcatagtttttgatggcaagtccaaatgcgacgagtctgcttctaagtctgcttctgtgtactacagtcagctgatgtgccaacctattctgttgcttgaccaagctcttgtatcagacgttggagatagtactgaagtttccgttaagatgtttgatgcttatgtcgacaccttttcagcaacttttagtgttcctatggaaaaacttaaggcacttgttgctacagctcacagcgagttagcaaagggtgtagctttagatggtgtcctttctacattcgtgtcagctgcccgacaaggtgttgttgataccgatgttgacacaaaggatgttattgaatgtctcaaactttcacatcactctgacttagaagtgacaggtgacagttgtaacaatttcatgctcacctataataaggttgaaaacatgacgcccagagatcttggcgcatgtattgactgtaatgcaaggcatatcaatgcccaagtagcaaaaagtcacaatgtttcactcatctggaatgtaaaagactacatgtctttatctgaacagctgcgtaaacaaattcgtagtgctgccaagaagaacaacataccttttagactaacttgtgctacaactagacaggttgtcaatgtcataactactaaaatctcactcaagggtggtaagattgttagtacttgttttaaacttatgcttaaggccacattattgtgcgttcttgctgcattggtttgttatatcgttatgccagtacatacattgtcaatccatgatggttacacaaatgaaatcattggttacaaagccattcaggatggtgtcactcgtgacatcatttctactgatgattgttttgcaaataaacatgctggttttgacgcatggtttagccagcgtggtggttcatacaaaaatgacaaaagctgccctgtagtagctgctatcattacaagagagattggtttcatagtgcctggcttaccgggtactgtgctgagagcaatcaatggtgacttcttgcattttctacctcgtgtttttagtgctgttggcaacatttgctacacaccttccaaactcattgagtatagtgattttgctacctctgcttgcgttcttgctgctgagtgtacaatttttaaggatgctatgggcaaacctgtgccatattgttatgacactaatttgctagagggttctatttcttatagtgagcttcgtccagacactcgttatgtgcttatggatggttccatcatacagtttcctaacacttacctggagggttctgttagagtagtaacaacttttgatgctgagtactgtagacatggtacatgcgaaaggtcagaagtaggtatttgcctatctaccagtggtagatgggttcttaataatgagcattacagagctctatcaggagttttctgtggtgttgatgcgatgaatctcatagctaacatctttactcctcttgtgcaacctgtgggtgctttagatgtgtctgcttcagtagtggctggtggtattattgccatattggtgacttgtgctgcctactactttatgaaattcagacgtgtttttggtgagtacaaccatgttgttgctgctaatgcacttttgtttttgatgtctttcactatactctgtctggtaccagcttacagctttctgccgggagtctactcagtcttttacttgtacttgacattctatttcaccaatgatgtttcattcttggctcaccttcaatggtttgccatgttttctcctattgtgcctttttggataacagcaatctatgtattctgtatttctctgaagcactgccattggttctttaacaactatcttaggaaaagagtcatgtttaatggagttacatttagtaccttcgaggaggctgctttgtgtacctttttgctcaacaaggaaatgtacctaaaattgcgtagcgagacactgttgccacttacacagtataacaggtatcttgctctatataacaagtacaagtatttcagtggagccttagatactaccagctatcgtgaagcagcttgctgccacttagcaaaggctctaaatgactttagcaactcaggtgctgatgttctctaccaaccaccacagacatcaatcacttctgctgttctgcagagtggttttaggaaaatggcattcccgtcaggcaaagttgaagggtgcatggtacaagtaacctgtggaactacaactcttaatggattgtggttggatgacacagtatactgtccaagacatgtcatttgcacagcagaagacatgcttaatcctaactatgaagatctgctcattcgcaaatccaaccatagctttcttgttcaggctggcaatgttcaacttcgtgttattggccattctatgcaaaattgtctgcttaggcttaaagttgatacttctaaccctaagacacccaagtataaatttgtccgtatccaacctggtcaaacattttcagttctagcatgctacaatggttcaccatctggtgtttatcagtgtgccatgagacctaatcataccattaaaggttctttccttaatggatcatgtggtagtgttggttttaacattgattatgattgcgtgtctttctgctatatgcatcatatggagcttccaacaggagtacacgctggtactgacttagaaggtaaattctatggtccatttgttgacagacaaactgcacaggctgcaggtacagacacaaccataacattaaatgttttggcatggctgtatgctgctgttatcaatggtgataggtggtttcttaatagattcaccactactttgaatgactttaaccttgtggcaatgaagtacaactatgaacctttgacacaagatcatgttgacatattgggacctctttctgctcaaacaggaattgccgtcttagatatgtgtgctgctttgaaagagctgctgcagaatggtatgaatggtcgtactatccttggtagcactattttagaagatgagtttacaccatttgatgttgttagacaatgctctggtgttaccttccaaggtaagttcaagaaaattgttaagggcactcatcattggatgcttttaactttcttgacatcactattgattcttgttcaaagtacacagtggtcactgtttttctttgtttacgagaatgctttcttgccatttactcttggtattatggcaattgctgcatgtgctatgctgcttgttaagcataagcacgcattcttgtgcttgtttctgttaccttctcttgcaacagttgcttactttaatatggtctacatgcctgctagctgggtgatgcgtatcatgacatggcttgaattggctgacactagcttgtctggttataggcttaaggattgtgttatgtatgcttcagctttagttttgcttattctcatgacagctcgcactgtttatgatgatgctgctagacgtgtttggacactgatgaatgtcattacacttgtttacaaagtctactatggtaatgctttagatcaagctatttccatgtgggccttagttatttctgtaacctctaactattctggtgtcgttacgactatcatgtttttagctagagctatagtgtttgtgtgtgttgagtattacccattgttatttattactggcaacaccttacagtgtatcatgcttgtttattgtttcttaggctattgttgctgctgctactttggccttttctgtttactcaaccgttacttcaggcttactcttggtgtttatgactacttggtctctacacaagaatttaggtatatgaactcccaggggcttttgcctcctaagagtagtattgatgctttcaagcttaacattaagttgttgggtattggaggtaaaccatgtatcaaggttgctactgtacagtctaaaatgtctgacgtaaagtgcacatctgtggtactgctctcggttcttcaacaacttagagtagagtcatcttctaaattgtgggcacaatgtgtacaactccacaatgatattcttcttgcaaaagacacaactgaagctttcgagaagatggtttctcttttgtctgttttgctatccatgcagggtgctgtagacattaataggttgtgcgaggaaatgctcgataaccgtgctactcttcaggctattgcttcagaatttagttctttaccatcatatgccgcttatgccactgcccaggaggcctatgagcaggctgtagctaatggtgattctgaagtcgttctcaaaaagttaaagaaatctttgaatgtggctaaatctgagtttgaccgtgatgctgccatgcaacgcaagttggaaaagatggcagatcaggctatgacccaaatgtacaaacaggcaagatctgaggacaagagggcaaaagtaactagtgctatgcaaacaatgctcttcactatgcttaggaagcttgataatgatgcacttaacaacattatcaacaatgcgcgtgatggttgtgttccactcaacatcataccattgactacagcagccaaactcatggttgttgtccctgattatggtacctacaagaacacttgtgatggtaacacctttacatatgcatctgcactctgggaaatccagcaagttgttgatgcggatagcaagattgttcaacttagtgaaattaacatggacaattcaccaaatttggcttggcctcttattgttacagctctaagagccaactcagctgttaaactacagaataatgaactgagtccagtagcactacgacagatgtcctgtgcggctggtaccacacaaacagcttgtactgatgacaatgcacttgcctactataacaattcgaagggaggtaggtttgtgctggcattactatcagaccaccaagatctcaaatgggctagattccctaagagtgatggtacaggtacaatttacacagaactggaaccaccttgtaggtttgttacagacacaccaaaagggcctaaagtgaaatacttgtacttcatcaaaggcttaaacaacctaaatagaggtatggtgctgggcagtttagctgctacagtacgtcttcaggctggaaatgctacagaagtacctgccaattcaactgtgctttccttctgtgcttttgcagtagaccctgctaaagcatataaggattacctagcaagtggaggacaaccaatcaccaactgtgtgaagatgttgtgtacacacactggtacaggacaggcaattactgtaacaccagaagctaacatggaccaagagtcctttggtggtgcttcatgttgtctgtattgtagatgccacattgaccatccaaatcctaaaggattctgtgacttgaaaggtaagtacgtccaaatacctaccacttgtgctaatgacccagtgggttttacacttagaaacacagtctgtaccgtctgcggaatgtggaaaggttatggctgtagttgtgaccaactccgcgaacccttgatgcagtctgcggatgcatcaacgtttttaaacgggtttgcggtgtaagtgcagcccgtcttacaccgtgcggcacaggcactagtactgatgtcgtctacagggcttttgatatttacaacgaaaaagttgctggttttgcaaagttcctaaaaactaattgctgtcgcttccaggagaaggatgaggaaggcaatttattagactcttactttgtagttaagaggcatactatgtctaactaccaacatgaagagactatttataacttggttaaagattgtccagcggttgctgtccatgactttttcaagtttagagtagatggtgacatggtaccacatatatcacgtcagcgtctaactaaatacacaatggctgatttagtctatgctctacgtcattttgatgagggtaattgtgatacattaaaagaaatactcgtcacatacaattgctgtgatgatgattatttcaataagaaggattggtatgacttcgtagagaatcctgacatcttacgcgtatatgctaacttaggtgagcgtgtacgccaatcattattaaagactgtacaattctgcgatgctatgcgtgatgcaggcattgtaggcgtactgacattagataatcaggatcttaatgggaactggtacgatttcggtgatttcgtacaagtagcaccaggctgcggagttcctattgtggattcatattactcattgctgatgcccatcctcactttgactagggcattggctgctgagtcccatatggatgctgatctcgcaaaaccacttattaagtgggatttgctgaaatatgattttacggaagagagactttgtctcttcgaccgttattttaaatattgggaccagacataccatcccaattgtattaactgtttggatgataggtgtatccttcattgtgcaaactttaatgtgttattttctactgtgtttccacctacaagttttggaccactagtaagaaaaatatttgtagatggtgttccttttgttgtttcaactggataccattttcgtgagttaggagtcgtacataatcaggatgtaaacttacatagctcgcgtctcagtttcaaggaacttttagtgtatgctgctgatccagctatgcatgcagcttctggcaatttattgctagataaacgcactacatgcttttcagtagctgcactaacaaacaatgttgcttttcaaactgtcaaacccggtaattttaataaagacttttatgactttgctgtgtctaaaggtttctttaaggaaggaagttctgttgaactaaaacacttcttctttgctcaggatggcaacgctgctatcagtgattatgactattatcgttataatctgccaacaatgtgtgatatcagacaactcctattcgtagttgaagttgttgataaatactttgattgttacgatggtggctgtattaatgccaaccaagtaatcgttaacaatctggataaatcagctggtttcccatttaataaatggggtaaggctagactttattatgactcaatgagttatgaggatcaagatgcacttttcgcgtatactaagcgtaatgtcatccctactataactcaaatgaatcttaagtatgccattagtgcaaagaatagagctcgcaccgtagctggtgtctctatctgtagtactatgacaaatagacagtttcatcagaaattattgaagtcaatagccgccactagaggagctactgtggtaattggaacaagcaagttttacggtggctggcataatatgttaaaaactgtttacagtgatgtagaaactccacaccttatgggttgggattatccaaaatgtgacagagccatgcctaacatgcttaggataatggcctctcttgttcttgctcgcaaacataacacttgctgtaacttatcacaccgtttctacaggttagctaacgagtgtgcgcaagtattaagtgagatggtcatgtgtggcggctcactatatgttaaaccaggtggaacatcatccggtgatgctacaactgcttatgctaatagtgtctttaacatttgtcaagctgttacagccaatgtaaatgcacttctttcaactgatggtaataagatagctgacaagtatgtccgcaatctacaacacaggctctatgagtgtctctatagaaatagggatgttgatcatgaattcgtggatgagttttacgcttacctgcgtaaacatttctccatgatgattctttctgatgatgccgttgtgtgctataacagtaactatgcggctcaaggtttagtagctagcattaagaactttaaggcagttctttattatcaaaataatgtgttcatgtctgaggcaaaatgttggactgagactgaccttactaaaggacctcacgaattttgctcacagcatacaatgctagttaaacaaggagatgattacgtgtacctgccttacccagatccatcaagaatattaggcgcaggctgttttgtcgatgatattgtcaaaacagatggtacacttatgattgaaaggttcgtgtcactggctattgatgcttacccacttacaaaacatcctaatcaggagtatgctgatgtctttcacttgtatttacaatacattagaaagttacatgatgagcttactggccacatgttggacatgtattccgtaatgctaactaatgataacacctcacggtactgggaacctgagttttatgaggctatgtacacaccacatacagtcttgcaggctgtaggtgcttgtgtattgtgcaattcacagacttcacttcgttgcggtgcctgtattaggagaccattcctatgttgcaagtgctgctatgaccatgtcatttcaacatcacacaaattagtgttgtctgttaatccctatgtttgcaatgccccgggttgtgatgtcactgatgtgacacaactgtatctaggaggtatgagctattattgcaagtcacataagcctcccattagttttccattatgtgctaatggtcaggtttttggtttatacaaaaacacatgtgtaggcagtgacaatgtcactgacttcaatgcgatagcaacatgtgattggactaatgctggcgattacatacttgccaacacttgtactgagagactcaagcttttcgcagcagaaacgctcaaagccactgaggaaacatttaagctgtcatatggtattgccactgtacgcgaagtactctctgacagagaattgcatctttcatgggaggttggaaaacctagaccaccattgaacagaaactatgtctttactggttaccgtgtaactaaaaatagtaaagtacagattggagagtacacctttgaaaaaggtgactatggtgatgctgttgtgtacagaggtactacgacatacaagttgaatgttggtgattactttgtgttgacatctcacactgtaatgccacttagtgcacctactctagtgccacaagagcactatgtgagaattactggcttgtacccaacactcaacatctcagatgagttttctagcaatgttgcaaattatcaaaaggtcggcatgcaaaagtactctacactccaaggaccacctggtactggtaagagtcattttgccatcggacttgctctctattacccatctgctcgcatagtgtatacggcatgctctcatgcagctgttgatgccctatgtgaaaaggcattaaaatatttgcccatagataaatgtagtagaatcatacctgcgcgtgcgcgcgtagagtgttttgataaattcaaagtgaattcaacactagaacagtatgttttctgcactgtaaatgcattgccagaaacaactgctgacattgtagtctttgatgaaatctctatggctactaattatgacttgagtgttgtcaatgctagacttcgtgcaaaacactacgtctatattggcgatcctgctcaattaccagccccccgcacattgctgactaaaggcacactagaaccagaatattttaattcagtgtgcagacttatgaaaacaataggtccagacatgttccttggaacttgtcgccgttgtcctgctgaaattgttgacactgtgagtgctttagtttatgacaataagctaaaagcacacaaggataagtcagctcaatgcttcaaaatgttctacaaaggtgttattacacatgatgtttcatctgcaatcaacagacctcaaataggcgttgtaagagaatttcttacacgcaatcctgcttggagaaaagctgtttttatctcaccttataattcacagaacgctgtagcttcaaaaatcttaggattgcctacgcagactgttgattcatcacagggttctgaatatgactatgtcatattcacacaaactactgaaacagcacactcttgtaatgtcaaccgcttcaatgtggctatcacaagggcaaaaattggcattttgtgcataatgtctgatagagatctttatgacaaactgcaatttacaagtctagaaataccacgtcgcaatgtggctacattacaagcagaaaatgtaactggactttttaaggactgtagtaagatcattactggtcttcatcctacacaggcacctacacacctcagcgttgatataaagttcaagactgaaggattatgtgttgacataccaggcataccaaaggacatgacctaccgtagactcatctctatgatgggtttcaaaatgaattaccaagtcaatggttaccctaatatgtttatcacccgcgaagaagctattcgtcacgttcgtgcgtggattggctttgatgtagagggctgtcatgcaactagagatgctgtgggtactaacctacctctccagctaggattttctacaggtgttaacttagtagctgtaccgactggttatgttgacactgaaaataacacagaattcaccagagttaatgcaaaacctccaccaggtgaccagtttaaacatcttataccactcatgtataaaggcttgccctggaatgtagtgcgtattaagatagtacaaatgctcagtgatacactgaaaggattgtcagacagagtcgtgttcgtcctttgggcgcatggctttgagcttacatcaatgaagtactttgtcaagattggacctgaaagaacgtgttgtctgtgtgacaaacgtgcaacttgcttttctacttcatcagatacttatgcctgctggaatcattctgtgggttttgactatgtctataacccatttatgattgatgttcagcagtggggctttacgggtaaccttcagagtaaccatgaccaacattgccaggtacatggaaatgcacatgtggctagttgtgatgctatcatgactagatgtttagcagtccatgagtgctttgttaagcgcgttgattggtctgttgaataccctattataggagatgaactgagggttaattctgcttgcagaaaagtacaacacatggttgtgaagtctgcattgcttgctgataagtttccagttcttcatgacattggaaatccaaaggctatcaagtgtgtgcctcaggctgaagtagaatggaagttctacgatgctcagccatgtagtgacaaagcttacaaaatagaggaactcttctattcttatgctacacatcacgataaattcactgatggtgtttgtttgttttggaattgtaacgttgatcgttacccagccaatgcaattgtgtgtaggtttgacacaagagtcttgtcaaacttgaacttaccaggctgtgatggtggtagtttgtatgtgaataagcatgcattccacactccagctttcgataaaagtgcatttactaatttaaagcaattgcctttcttttactattctgatagtccttgtgagtctcatggcaaacaagtagtgtcggatattgattatgttccactcaaatctgctacgtgtattacacgatgcaatttaggtggtgctgtttgcagacaccatgcaaatgagtaccgacagtacttggatgcatataatatgatgatttctgctggatttagcctatggatttacaaacaatttgatacttataacctgtggaatacatttaccaggttacagagtttagaaaatgtggcttataatgttgttaataaaggacactttgatggacacgccggcgaagcacctgtttccatcattaataatgctgtttacacaaaggtagatggtattgatgtggagatctttgaaaataagacaacacttcctgttaatgttgcatttgagctttgggctaagcgtaacattaaaccagtgccagagattaagatactcaataatttgggtgttgatatcgctgctaatactgtaatctgggactacaaaagagaagccccagcacatgtatctacaataggtgtctgcacaatgactgacattgccaagaaacctactgagagtgcttgttcttcacttactgtcttgtttgatggtagagtggaaggacaggtagacctttttagaaacgcccgtaatggtgttttaataacagaaggttcagtcaaaggtctaacaccttcaaagggaccagcacaagctagcgtcaatggagtcacattaattggagaatcagtaaaaacacagtttaactactttaagaaagtagacggcattattcaacagttgcctgaaacctactttactcagagcagagacttagaggattttaagcccagatcacaaatggaaactgactttctcgagctcgctatggatgaattcatacagcgatataagctcgagggctatgccttcgaacacatcgtttatggagatttcagtcatggacaacttggcggtcttcatttaatgataggcttagccaagcgctcacaagattcaccacttaaattagaggattttatccctatggacagcacagtgaaaaattacttcataacagatgcgcaaacaggttcatcaaaatgtgtgtgttctgtgattgatcttttacttgatgactttgtcgagataataaagtcacaagatttgtcagtgatttcaaaagtggtcaaggttacaattgactatgctgaaatttcattcatgctttggtgtaaggatggacatgttgaaaccttctacccaaaactacaagcaagtcaagcgtggcaaccaggtgttgcgatgcctaacttgtacaagatgcaaagaatgcttcttgaaaagtgtgaccttcagaattatggtgaaaatgctgttataccaaaaggaataatgatgaatgtcgcaaagtatactcaactgtgtcaatacttaaatacacttactttagctgtaccctacaacatgagagttattcactttggtgctggctctgataaaggagttgcaccaggtacagctgtgctcagacaatggttgccaactggcacactacttgtcgattcagatcttaatgacttcgtctccgacgcagattctactttaattggagactgtgcaacagtacatacggctaataaatgggaccttattattagcgatatgtatgaccctaggaccaaacatgtgacaaaagagaatgactctaaagaagggtttttcacttatctgtgtggatttataaagcaaaaactagccctgggtggttctatagctgtaaagataacagagcattcttggaatgctgacctttacaagcttatgggccatttctcatggtggacagcttttgttacaaatgtaaatgcatcatcatcggaagcatttttaattggggctaactatcttggcaagccgaaggaacaaattgatggctataccatgcatgctaactacattttctggaggaacacaaatcctatccagttgtcttcctattcactctttgacatgagcaaatttcctcttaaattaagaggaactgctgtaatgtctcttaaggagaatcaaatcaatgatatgatttattctcttctggaaaaaggtaggcttatcattagagaaaacaacagagttgtggtttcaagtgatattcttgttaacaactaaacgaacatgtttattttcttattatttcttactctcactagtggtagtgaccttgaccggtgcaccacttttgatgatgttcaagctcctaattacactcaacatacttcatctatgaggggggtttactatcctgatgaaatttttagatcagacactctttatttaactcaggatttatttcttccattttattctaatgttacagggtttcatactattaatcatacgtttggcaaccctgtcataccttttaaggatggtatttattttgctgccacagagaaatcaaatgttgtccgtggttgggtttttggttctaccatgaacaacaagtcacagtcggtgattattattaacaattctactaatgttgttatacgagcatgtaactttgaattgtgtgacaaccctttctttgctgtttctaaacccatgggtacacagacacatactatgatattcgataatgcatttaattgcactttcgagtacatatctgatgccttttcgcttgatgtttcagaaaagtcaggtaattttaaacacttacgagagtttgtgtttaaaaataaagatgggtttctctatgtttataagggctatcaacctatagatgtagttcgtgatctaccttctggttttaacactttgaaacctatttttaagttgcctcttggtattaacattacaaattttagagccattcttacagccttttcacctgctcaagacatttggggcacgtcagctgcagcctattttgttggctatttaaagccaactacatttatgctcaagtatgatgaaaatggtacaatcacagatgctgttgattgttctcaaaatccacttgctgaactcaaatgctctgttaagagctttgagattgacaaaggaatttaccagacctctaatttcagggttgttccctcaggagatgttgtgagattccctaatattacaaacttgtgtccttttggagaggtttttaatgctactaaattcccttctgtctatgcatgggagagaaaaaaaatttctaattgtgttgctgattactctgtgctctacaactcaacatttttttcaacctttaagtgctatggcgtttctgccactaagttgaatgatctttgcttctccaatgtctatgcagattcttttgtagtcaagggagatgatgtaagacaaatagcgccaggacaaactggtgttattgctgattataattataaattgccagatgatttcatgggttgtgtccttgcttggaatactaggaacattgatgctacttcaactggtaattataattataaatataggtatcttagacatggcaagcttaggccctttgagagagacatatctaatgtgcctttctcccctgatggcaaaccttgcaccccacctgctcttaattgttattggccattaaatgattatggtttttacaccactactggcattggctaccaaccttacagagttgtagtactttcttttgaacttttaaatgcaccggccacggtttgtggaccaaaattatccactgaccttattaagaaccagtgtgtcaattttaattttaatggactcactggtactggtgtgttaactccttcttcaaagagatttcaaccatttcaacaatttggccgtgatgtttctgatttcactgattccgttcgagatcctaaaacatctgaaatattagacatttcaccttgctcttttgggggtgtaagtgtaattacacctggaacaaatgcttcatctgaagttgctgttctatatcaagatgttaactgcactgatgtttctacagcaattcatgcagatcaactcacaccagcttggcgcatatattctactggaaacaatgtattccagactcaagcaggctgtcttataggagctgagcatgtcgacacttcttatgagtgcgacattcctattggagctggcatttgtgctagttaccatacagtttctttattacgtagtactagccaaaaatctattgtggcttatactatgtctttaggtgctgatagttcaattgcttactctaataacaccattgctatacctactaacttttcaattagcattactacagaagtaatgcctgtttctatggctaaaacctccgtagattgtaatatgtacatctgcggagattctactgaatgtgctaatttgcttctccaatatggtagcttttgcacacaactaaatcgtgcactctcaggtattgctgctgaacaggatcgcaacacacgtgaagtgttcgctcaagtcaaacaaatgtacaaaaccccaactttgaaatattttggtggttttaatttttcacaaatattacctgaccctctaaagccaactaagaggtcttttattgaggacttgctctttaataaggtgacactcgctgatgctggcttcatgaagcaatatggcgaatgcctaggtgatattaatgctagagatctcatttgtgcgcagaagttcaatggacttacagtgttgccacctctgctcactgatgatatgattgctgcctacactgctgctctagttagtggtactgccactgctggatggacatttggtgctggcgctgctcttcaaataccttttgctatgcaaatggcatataggttcaatggcattggagttacccaaaatgttctctatgagaaccaaaaacaaatcgccaaccaatttaacaaggcgattagtcaaattcaagaatcacttacaacaacatcaactgcattgggcaagctgcaagacgttgttaaccagaatgctcaagcattaaacacacttgttaaacaacttagctctaattttggtgcaatttcaagtgtgctaaatgatatcctttcgcgacttgataaagtcgaggcggaggtacaaattgacaggttaattacaggcagacttcaaagccttcaaacctatgtaacacaacaactaatcagggctgctgaaatcagggcttctgctaatcttgctgctactaaaatgtctgagtgtgttcttggacaatcaaaaagagttgacttttgtggaaagggctaccaccttatgtccttcccacaagcagccccgcatggtgttgtcttcctacatgtcacgtatgtgccatcccaggagaggaacttcaccacagcgccagcaatttgtcatgaaggcaaagcatacttccctcgtgaaggtgtttttgtgtttaatggcacttcttggtttattacacagaggaacttcttttctccacaaataattactacagacaatacatttgtctcaggaaattgtgatgtcgttattggcatcattaacaacacagtttatgatcctctgcaacctgagcttgactcattcaaagaagagctggacaagtacttcaaaaatcatacatcaccagatgttgatcttggcgacatttcaggcattaacgcttctgtcgtcaacattcaaaaagaaattgaccgcctcaatgaggtcgctaaaaatttaaatgaatcactcattgaccttcaagaattgggaaaatatgagcaatatattaaatggccttggtatgtttggctcggcttcattgctggactaattgccatcgtcatggttacaatcttgctttgttgcatgactagttgttgcagttgcctcaagggtgcatgctcttgtggttcttgctgcaagtttgatgaggatgactctgagccagttctcaagggtgtcaaattacattacacataaacgaacttatggatttgtttatgagattttttactcttggatcaattactgcacagccagtaaaaattgacaatgcttctcctgcaagtactgttcatgctacagcaacgataccgctacaagcctcactccctttcggatggcttgttattggcgttgcatttcttgctgtttttcagagcgctaccaaaataattgcgctcaataaaagatggcagctagccctttataagggcttccagttcatttgcaatttactgctgctatttgttaccatctattcacatcttttgcttgtcgctgcaggtatggaggcgcaatttttgtacctctatgccttgatatattttctacaatgcatcaacgcatgtagaattattatgagatgttggctttgttggaagtgcaaatccaagaacccattactttatgatgccaactactttgtttgctggcacacacataactatgactactgtataccatataacagtgtcacagatacaattgtcgttactgaaggtgacggcatttcaacaccaaaactcaaagaagactaccaaattggtggttattctgaggataggcactcaggtgttaaagactatgtcgttgtacatggctatttcaccgaagtttactaccagcttgagtctacacaaattactacagacactggtattgaaaatgctacattcttcatctttaacaagcttgttaaagacccaccgaatgtgcaaatacacacaatcgacggctcttcaggagttgctaatccagcaatggatccaatttatgatgagccgacgacgactactagcgtgcctttgtaagcacaagaaagtgagtacgaacttatgtactcattcgtttcggaagaaacaggtacgttaatagttaatagcgtacttctttttcttgctttcgtggtattcttgctagtcacactagccatccttactgcgcttcgattgtgtgcgtactgctgcaatattgttaacgtgagtttagtaaaaccaacggtttacgtctactcgcgtgttaaaaatctgaactcttctgaaggagttcctgatcttctggtctaaacgaactaactattattattattctgtttggaactttaacattgcttatcatggcagacaacggtactattaccgttgaggagcttaaacaactcctggaacaatggaacctagtaataggtttcctattcctagcctggattatgttactacaatttgcctattctaatcggaacaggtttttgtacataataaagcttgttttcctctggctcttgtggccagtaacacttgcttgttttgtgcttgctgttgtctacagaattaattgggtgactggcgggattgcgattgcaatggcttgtattgtaggcttgatgtggcttagctacttcgttgcttccttcaggctgtttgctcgtacccgctcaatgtggtcattcaacccagaaacaaacattcttctcaatgtgcctctccgggggacaattgtgaccagaccgctcatggaaagtgaacttgtcattggtgctgtgatcattcgtggtcacttgcgaatggccggacactccctagggcgctgtgacattaaggacctgccaaaagagatcactgtggctacatcacgaacgctttcttattacaaattaggagcgtcgcagcgtgtaggcactgattcaggttttgctgcatacaaccgctaccgtattggaaactataaattaaatacagaccacgccggtagcaacgacaatattgctttgctagtacagtaagtgacaacagatgtttcatcttgttgacttccaggttacaatagcagagatattgattatcattatgaggactttcaggattgctatttggaatcttgacgttataataagttcaatagtgagacaattatttaagcctctaactaagaagaattattcggagttagatgatgaagaacctatggagttagattatccataaaacgaacatgaaaattattctcttcctgacattgattgtatttacatcttgcgagctatatcactatcaggagtgtgttagaggtacgactgtactactaaaagaaccttgcccatcaggaacatacgagggcaattcaccatttcaccctcttgctgacaataaatttgcactaacttgcactagcacacactttgcttttgcttgtgctgacggtactcgacatacctatcagctgcgtgcaagatcagtttcaccaaaacttttcatcagacaagaggaggttcaacaagagctctactcgccactttttctcattgttgctgctctagtatttttaatactttgcttcaccattaagagaaagacagaatgaatgagctcactttaattgacttctatttgtgctttttagcctttctgctattccttgttttaataatgcttattatattttggttttcactcgaaatccaggatctagaagaaccttgtaccaaagtctaaacgaacatgaaacttctcattgttttgacttgtatctctatgcagttgcatatgcactgtagtacagcgctgtgcatctaataaacctcatgtgcttgaagatccttgtaaggtacaacactaggggtaatacttatagcactgcttggctttgtgctctaggaaaggttttaccttttcatagatggcacactatggttcaaacatgcacacctaatgttactatcaactgtcaagatccagctggtggtgcgcttatagctaggtgttggtaccttcatgaaggtcaccaaactgctgcatttagagacgtacttgttgttttaaataaacgaacaaattaaaatgtctgataatggaccccaatcaaaccaacgtagtgccccccgcattacatttggtggacccacagattcaactgacaataaccagaatggaggacgcaatggggcaaggccaaaacagcgccgaccccaaggtttacccaataatactgcgtcttggttcacagctctcactcagcatggcaaggaggaacttagattccctcgaggccagggcgttccaatcaacaccaatagtggtccagatgaccaaattggctactaccgaagagctacccgacgagttcgtggtggtgacggcaaaatgaaagagctcagccccagatggtacttctattacctaggaactggcccagaagcttcacttccctacggcgctaacaaagaaggcatcgtatgggttgcaactgagggagccttgaatacacccaaagaccacattggcacccgcaatcctaataacaatgctgccaccgtgctacaacttcctcaaggaacaacattgccaaaaggcttctacgcagagggaagcagaggcggcagtcaagcctcttctcgctcctcatcacgtagtcgcggtaattcaagaaattcaactcctggcagcagtaggggaaattctcctgctcgaatggctagcggaggtggtgaaactgccctcgcgctattgctgctagacagattgaaccagcttgagagcaaagtttctggtaaaggccaacaacaacaaggccaaactgtcactaagaaatctgctgctgaggcatctaaaaagcctcgccaaaaacgtactgccacaaaacagtacaacgtcactcaagcatttgggagacgtggtccagaacaaacccaaggaaatttcggggaccaagacctaatcagacaaggaactgattacaaacattggccgcaaattgcacaatttgctccaagtgcctctgcattctttggaatgtcacgcattggcatggaagtcacaccttcgggaacatggctgacttatcatggagccattaaattggatgacaaagatccacaattcaaagacaacgtcatactgctgaacaagcacattgacgcatacaaaacattcccaccaacagagcctaaaaaggacaaaaagaaaaagactgatgaagctcagcctttgccgcagagacaaaagaagcagcccactgtgactcttcttcctgcggctgacatggatgatttctccagacaacttcaaaattccatgagtggagcttctgctgattcaactcaggcataaacactcatgatgaccacacaaggcagatgggctatgtaaacgttttcgcaattccgtttacgatacatagtctactcttgtgcagaatgaattctcgtaactaaacagcacaagtaggtttagttaactttaatctcacatagcaatctttaatcaatgtgtaacattagggaggacttgaaagagccaccacattttcatcgaggccacgcggagtacgatcgagggtacagtgaataatgctagggagagctgcctatatggaagagccctaatgtgtaaaattaattttagtagtgctatccccatgtgattttaatagcttcttaggagaatgac

SEQ ID NO: 78 - DNA, 29727 bp, Coronavirus
atattaggtttttacctacccaggaaaagccaaccaacctcgatctcttgtagatctgttctctaaacgaactttaaaatctgtgtagctgtcgctcggctgcatgcctagtgcacctacgcagtataaacaataataaattttactgtcgttgacaagaaacgagtaactcgtccctcttctgcagactgcttacggtttcgtccgtgttgcagtcgatcatcagcatacctaggtttcgtccgggtgtgaccgaaaggtaagatggagagccttgttcttggtgtcaacgagaaaacacacgtccaactcagtttgcctgtccttcaggttagagacgtgctagtgcgtggcttcggggactctgtggaagaggccctatcggaggcacgtgaacacctcaaaaatggcacttgtggtctagtagagctggaaaaaggcgtactgccccagcttgaacagccctatgtgttcattaaacgttctgatgccttaagcaccaatcacggccacaaggtcgttgagctggttgcagaaatggacggcattcagtacggtcgtagcggtataacactgggagtactcgtgccacatgtgggcgaaaccccaattgcataccgcaatgttcttcttcgtaagaacggtaataagggagccggtggtcatagctatggcatcgatctaaagtcttatgacttaggtgacgagcttggcactgatcccattgaagattatgaacaaaactggaacactaagcatggcagtggtgcactccgtgaactcactcgtgagctcaatggaggtgcagtcactcgctatgtcgacaacaatttctgtggcccagatgggtaccctcttgattgcatcaaagattttctcgcacgcgcgggcaagtcaatgtgcactctttccgaacaacttgattacatcgagtcgaagagaggtgtctactgctgccgtgaccatgagcatgaaattgcctggttcactgagcgctctgataagagctacgagcaccagacacccttcgaaattaagagtgccaagaaatttgacactttcaaaggggaatgcccaaagtttgtgtttcctcttaactcaaaagtcaaagtcattcaaccacgtgttgaaaagaaaaagactgagggtttcatggggcgtatacgctctgtgtaccctgttgcatctccacaggagtgtaacaatatgcacttgtctaccttgatgaaatgtaatcattgcgatgaagtttcatggcagacgtgcgactttctgaaagccacttgtgaacattgtggcactgaaaatttagttattgaaggacctactacatgtgggtacctacctactaatgctgtagtgaaaatgccatgtcctgcctgtcaagacccagagattggacctgagcatagtgttgcagattatcacaaccactcaaacattgaaactcgactccgcaagggaggtaggactagatgttttggaggctgtgtgtttgcctatgttggctgctataataagcgtgcctactgggttcctcgtgctagtgctgatattggctcaggccatactggcattactggtgacaatgtggagaccttgaatgaggatctccttgagatactgagtcgtgaacgtgttaacattaacattgttggcgattttcatttgaatgaagaggttgccatcattttggcatctttctctgcttctacaagtgcctttattgacactataaagagtcttgattacaagtctttcaaaaccattgttgagtcctgtggtaactataaagttaccaagggaaagcccgtaaaaggtgcttggaacattggacaacagagatcagttttaacaccactgtgtggttttccctcacaggctgctggtgttatcagatcaatttttgcgcgcacacttgatgcagcaaaccactcaattcctgatttgcaaagagcagctgtcaccatacttgatggtatttctgaacagtcattacgtcttgtcgacgccatggtttatacttcagacctgctcaccaacagtgtcattattatggcatatgtaactggtggtcttgtacaacagacttctcagtggttgtctaatcttttgggcactactgttgaaaaactcaggcctatctttgaatggattgaggcgaaacttagtgcaggagttgaatttctcaaggatgcttgggagattctcaaatttctcattacaggtgtttttgacatcgtcaagggtcaaatacaggttgcttcagataacatcaaggattgtgtaaaatgcttcattgatgttgttaacaaggcactcgaaatgtgcattgatcaagtcactatcgctggcgcaaagttgcgatcactcaacttaggtgaagtcttcatcgctcaaagcaagggactttaccgtcagtgtatacgtggcaaggagcagctgcaactactcatgcctcttaaggcaccaaaagaagtaacctttcttgaaggtgattcacatgacacagtacttacctctgaggaggttgttctcaagaacggtgaactcgaagcactcgagacgcccgttgatagcttcacaaatggagctatcgttggcacaccagtctgtgtaaatggcctcatgctcttagagattaaggacaaagaacaatactgcgcattgtctcctggtttactggctacaaacaatgtctttcgcttaaaagggggtgcaccaattaaaggtgtaacctttggagaagatactgtttgggaagttcaaggttacaagaatgtgagaatcacatttgagcttgatgaacgtgttgacaaagtgcttaatgaaaagtgctctgtctacactgttgaatccggtaccgaagttactgagtttgcatgtgttgtagcagaggctgttgtgaagactttacaaccagtttctgatctccttaccaacatgggtattgatcttgatgagtggagtgtagctacattctacttatttgatgatgctggtgaagaaaacttttcatcacgtatgtattgttccttttaccctccagatgaggaagaagaggacgatgcagagtgtgaggaagaagaaattgatgaaacctgtgaacatgagtacggtacagaggatgattatcaaggtctccctctggaatttggtgcctcagctgaaacagttcgagttgaggaagaagaagaggaagactggctggatgatactactgagcaatcagagattgagccagaaccagaacctacacctgaagaaccagttaatcagtttactggttatttaaaacttactgacaatgttgccattaaatgtgttgacatcgttaaggaggcacaaagtgctaatcctatggtgattgtaaatgctgctaacatacacctgaaacatggtggtggtgtagcaggtgcactcaacaaggcaaccaatggtgccatgcaaaaggagagtgatgattacattaagctaaatggccctcttacagtaggagggtcttgtttgctttctggacataatcttgctaagaagtgtctgcatgttgttggacctaacctaaatgcaggtgaggacatccagcttcttaaggcagcatatgaaaatttcaattcacaggacatcttacttgcaccattgttgtcagcaggcatatttggtgctaaaccacttcagtctttacaagtgtgcgtgcagacggttcgtacacaggtttatattgcagtcaatgacaaagctctttatgagcaggttgtcatggattatcttgataacctgaagcctagagtggaagcacctaaacaagaggagccaccaaacacagaagattccaaaactgaggagaaatccgtcgtacagaagcctgtcgatgtgaagccaaaaattaaggcctgcattgatgaggttaccacaacactggaagaaactaagtttcttaccaataagttactcttgtttgctgatatcaatggtaagctttaccatgattctcagaacatgcttagaggtgaagatatgtctttccttgagaaggatgcaccttacatggtaggtgatgttatcactagtggtgatatcacttgtgttgtaataccctccaaaaaggctggtggcactactgagatgctctcaagagctttgaagaaagtgccagttgatgagtatataaccacgtaccctggacaaggatgtgctggttatacacttgaggaagctaagactgctcttaagaaatgcaaatctgcattttatgtactaccttcagaagcacctaatgctaaggaagagattctaggaactgtatcctggaatttgagagaaatgcttgctcatgctgaagagacaagaaaattaatgcctatatgcatggatgttagagccataatggcaaccatccaacgtaagtataaaggaattaaaattcaagagggcatcgttgactatggtgtccgattcttcttttatactagtaaagagcctgtagcttctattattacgaagctgaactctctaaatgagccgcttgtcacaatgccaattggttatgtgacacatggttttaatcttgaagaggctgcgcgctgtatgcgttctcttaaagctcctgccgtagtgtcagtatcatcaccagatgctgttactacatataatggatacctcacttcgtcatcaaagacatctgaggagcactttgtagaaacagtttctttggctggctcttacagagattggtcctattcaggacagcgtacagagttaggtgttgaatttcttaagcgtggtgacaaaattgtgtaccacactctggagagccccgtcgagtttcatcttgacggtgaggttctttcacttgacaaactaaagagtctcttatccctgcgggaggttaagactataaaagtgttcacaactgtggacaacactaatctccacacacagcttgtggatatgtctatgacatatggacagcagtttggtccaacatacttggatggtgctgatgttacaaaaattaaacctcatgtaaatcatgagggtaagactttctttgtactacctagtgatgacacactacgtagtgaagctttcgagtactaccatactcttgatgagagttttcttggtaggtacatgtctgctttaaaccacacaaagaaatggaaatttcctcaagttggtggtttaacttcaattaaatgggctgataacaattgttatttgtctagtgttttattagcacttcaacagcttgaagtcaaattcaatgcaccagcacttcaagaggcttattatagagcccgtgctggtgatgctgctaacttttgtgcactcatactcgcttacagtaataaaactgttggcgagcttggtgatgtcagagaaactatgacccatcttctacagcatgctaatttggaatctgcaaagcgagttcttaatgtggtgtgtaaacattgtggtcagaaaactactaccttaacgggtgtagaagctgtgatgtatatgggtactctatcttatgataatcttaagacaggtgtttccattccatgtgtgtgtggtcgtgatgctacacaatatctagtacaacaagagtcttcttttgttatgatgtctgcaccacctgctgagtataaattacagcaaggtacattcttatgtgcgaatgagtacactggtaactatcagtgtggtcattacactcatataactgctaaggagaccctctatcgtattgacggagctcaccttacaaagatgtcagagtacaaaggaccagtgactgatgttttctacaaggaaacatcttacactacaaccatcaagcctgtgtcgtataaactcgatggagttacttacacagagattgaaccaaaattggatgggtattataaaaaggataatgcttactatacagagcagcctatagaccttgtaccaactcaaccattaccaaatgcgagttttgataatttcaaactcacatgttctaacacaaaatttgctgatgatttaaatcaaatgacaggcttcacaaagccagcttcacgagagctatctgtcacattcttcccagacttgaatggcgatgtagtggctattgactatagacactattcagcgagtttcaagaaaggtgctaaattactgcataagccaattgtttggcacattaaccaggctacaaccaagacaacgttcaaaccaaacacttggtgtttacgttgtctttggagtacaaagccagtagatacttcaaattcatttgaagttctggcagtagaagacacacaaggaatggacaatcttgcttgtgaaagtcaacaacccacctctgaagaagtagtggaaaatcctaccatacagaaggaagtcatagagtgtgacgtgaaaactaccgaagttgtaggcaatgtcatacttaaaccatcagatgaaggtgttaaagtaacacaagagttaggtcatgaggatcttatggctgcttatgtggaaaacacaagcattaccattaagaaacctaatgagctttcactagccttaggtttaaaaacaattgccactcatggtattgctgcaattaatagtgttccttggagtaaaattttggcttatgtcaaaccattcttaggacaagcagcaattacaacatcaaattgcgctaagagattagcacaacgtgtgtttaacaattatatgccttatgtgtttacattattgttccaattgtgtacttttactaaaagtaccaattctagaattagagcttcactacctacaactattgctaaaaatagtgttaagagtgttgctaaattatgtttggatgccggcattaattatgtgaagtcacccaaattttctaaattgttcacaatcgctatgtggctattgttgttaagtatttgcttaggttctctaatctgtgtaactgctgcttttggtgtactcttatctaattttggtgctccttcttattgtaatggcgttagagaattgtatcttaattcgtctaacgttactactatggatttctgtgaaggttcttttccttgcagcatttgtttaagtggattagactcccttgattcttatccagctcttgaaaccattcaggtgacgatttcatcgtacaagctagacttgacaattttaggtctggccgctgagtgggttttggcatatatgttgttcacaaaattcttttatttattaggtctttcagctataatgcaggtgttctttggctattttgctagtcatttcatcagcaattcttggctcatgtggtttatcattagtattgtacaaatggcacccgtttctgcaatggttaggatgtacatcttctttgcttctttctactacatatggaagagctatgttcatatcatggatggttgcacctcttcgacttgcatgatgtgctataagcgcaatcgtgccacacgcgttgagtgtacaactattgttaatggcatgaagagatctttctatgtctatgcaaatggaggccgtggcttctgcaagactcacaattggaattgtctcaattgtgacacattttgcactggtagtacattcattagtgatgaagttgctcgtgatttgtcactccagtttaaaagaccaatcaaccctactgaccagtcatcgtatattgttgatagtgttgctgtgaaaaatggcgcgcttcacctctactttgacaaggctggtcaaaagacctatgagagacatccgctctcccattttgtcaatttagacaatttgagagctaacaacactaaaggttcactgcctattaatgtcatagtttttgatggcaagtccaaatgcgacgagtctgcttctaagtctgcttctgtgtactacagtcagctgatgtgccaacctattctgttgcttgaccaagctcttgtatcagacgttggagatagtactgaagtttccgttaagatgtttgatgcttatgtcgacaccttttcagcaacttttagtgttcctatggaaaaacttaaggcacttgttgctacagctcacagcgagttagcaaagggtgtagctttagatggtgtcctttctacattcgtgtcagctgcccgacaaggtgttgttgataccgatgttgacacaaaggatgttattgaatgtctcaaactttcacatcactctgacttagaagtgacaggtgacagttgtaacaatttcatgctcacctataataaggttgaaaacatgacgcccagagatcttggcgcatgtattgactgtaatgcaaggcatatcaatgcccaagtagcaaaaagtcacaatgtttcactcatctggaatgtaaaagactacatgtctttatctgaacagctgcgtaaacaaattcgtagtgctgccaagaagaacaacataccttttagactaacttgtgctacaactagacaggttgtcaatgtcataactactaaaatctcactcaagggtggtaagattgttagtacttgttttaaacttatgcttaaggccacattattgtgcgttcttgctgcattggtttgttatatcgttatgccagtacatacattgtcaatccatgatggttacacaaatgaaatcattggttacaaagccattcaggatggtgtcactcgtgacatcatttctactgatgattgttttgcaaataaacatgctggttttgacgcatggtttagccagcgtggtggttcatacaaaaatgacaaaagctgccctgtagtagctgctatcattacaagagagattggtttcatagtgcctggcttaccgggtactgtgctgagagcaatcaatggtgacttcttgcattttctacctcgtgtttttagtgctgttggcaacatttgctacacaccttccaaactcattgagtatagtgattttgctacctctgcttgcgttcttgctgctgagtgtacaatttttaaggatgctatgggcaaacctgtgccatattgttatgacactaatttgctagagggttctatttcttatagtgagcttcgtccagacactcgttatgtgcttatggatggttccatcatacagtttcctaacacttacctggagggttctgttagagtagtaacaacttttgatgctgagtactgtagacatggtacatgcgaaaggtcagaagtaggtatttgcctatctaccagtggtagatgggttcttaataatgagcattacagagctctatcaggagttttctgtggtgttgatgcgatgaatctcatagctaacatctttactcctcttgtgcaacctgtgggtgctttagatgtgtctgcttcagtagtggctggtggtattattgccatattggtgacttgtgctgcctactactttatgaaattcagacgtgtttttggtgagtacaaccatgttgttgctgctaatgcacttttgtttttgatgtctttcactatactctgtctggtaccagcttacagctttctgccgggagtctactcagtcttttacttgtacttgacattctatttcaccaatgatgtttcattcttggctcaccttcaatggtttgccatgttttctcctattgtgcctttttggataacagcaatctatgtattctgtatttctctgaagcactgccattggttctttaacaactatcttaggaaaagagtcatgtttaatggagttacatttagtaccttcgaggaggctgctttgtgtacctttttgctcaacaaggaaatgtacctaaaattgcgtagcgagacactgttgccacttacacagtataacaggtatcttgctctatataacaagtacaagtatttcagtggagccttagatactaccagctatcgtgaagcagcttgctgccacttagcaaaggctctaaatgactttagcaactcaggtgctgatgttctctaccaaccaccacagacatcaatcacttctgctgttctgcagagtggttttaggaaaatggcattcccgtcaggcaaagttgaagggtgcatggtacaagtaacctgtggaactacaactcttaatggattgtggttggatgacacagtatactgtccaagacatgtcatttgcacagcagaagacatgcttaatcctaactatgaagatctgctcattcgcaaatccaaccatagctttcttgttcaggctggcaatgttcaacttcgtgttattggccattctatgcaaaattgtctgcttaggcttaaagttgatacttctaaccctaagacacccaagtataaatttgtccgtatccaacctggtcaaacattttcagttctagcatgctacaatggttcaccatctggtgtttatcagtgtgccatgagacctaatcataccattaaaggttctttccttaatggatcatgtggtagtgttggttttaacattgattatgattgcgtgtctttctgctatatgcatcatatggagcttccaacaggagtacacgctggtactgacttagaaggtaaattctatggtccatttgttgacagacaaactgcacaggctgcaggtacagacacaaccataacattaaatgttttggcatggctgtatgctgctgttatcaatggtgataggtggtttcttaatagattcaccactactttgaatgactttaaccttgtggcaatgaagtacaactatgaacctttgacacaagatcatgttgacatattgggacctctttctgctcaaacaggaattgccgtcttagatatgtgtgctgctttgaaagagctgctgcagaatggtatgaatggtcgtactatccttggtagcactattttagaagatgagtttacaccatttgatgttgttagacaatgctctggtgttaccttccaaggtaagttcaagaaaattgttaagggcactcatcattggatgcttttaactttcttgacatcactattgattcttgttcaaagtacacagtggtcactgtttttctttgtttacgagaatgctttcttgccatttactcttggtattatggcaattgctgcatgtgctatgctgcttgttaagcataagcacgcattcttgtgcttgtttctgttaccttctcttgcaacagttgcttactttaatatggtctacatgcctgctagctgggtgatgcgtatcatgacatggcttgaattggctgacactagcttgtctggttataggcttaaggattgtgttatgtatgcttcagctttagttttgcttattctcatgacagctcgcactgtttatgatgatgctgctagacgtgtttggacactgatgaatgtcattacacttgtttacaaagtctactatggtaatgctttagatcaagctatttccatgtgggccttagttatttctgtaacctctaactattctggtgtcgttacgactatcatgtttttagctagagctatagtgtttgtgtgtgttgagtattatccattgttatttattactggcaacaccttacagtgtatcatgcttgtttattgtttcttaggctattgttgctgctgctactttggccttttctgtttactcaaccgttacttcaggcttactcttggtgtttatgactacttggtctctacacaagaatttaggtatatgaactcccaggggcttttgcctcctaagagtagtattgatgctttcaagcttaacattaagttgttgggtattggaggtaaaccatgtatcaaggttgctactgtacagtctaaaatgtctgacgtaaagtgcacatctgtggtactgctctcggttcttcaacaacttagagtagagtcatcttctaaattgtgggcacaatgtgtacaactccacaatgatattcttcttgcaaaagacacaactgaagctttcgagaagatggtttctcttttgtctgttttgctatccatgcagggtgctgtagacattaataggttgtgcgaggaaatgctcgataaccgtgctactcttcaggctattgcttcagaatttagttctttaccatcatatgccgcttatgccactgcccaggaggcctatgagcaggctgtagctaatggtgattctgaagtcgttctcaaaaagttaaagaaatctttgaatgtggctaaatctgagtttgaccgtgatgctgccatgcaacgcaagttggaaaagatggcagatcaggctatgacccaaatgtacaaacaggcaagatctgaggacaagagggcaaaagtaactagtgctatgcaaacaatgctcttcactatgcttaggaagcttgataatgatgcacttaacaacattatcaacaatgcgcgtgatggttgtgttccactcaacatcataccattgactacagcagccaaactcatggttgttgtccctgattatggtacctacaagaacacttgtgatggtaacacctttacatatgcatctgcactctgggaaatccagcaagttgttgatgcggatagcaagattgttcaacttagtgaaattaacatggacaattcaccaaatttggcttggcctcttattgttacagctctaagagccaactcagctgttaaactacagaataatgaactgagtccagtagcactacgacagatgtcctgtgcggctggtaccacacaaacagcttgtactgatgacaatgcacttgcctactataacaattcgaagggaggtaggtttgtgctggcattactatcagaccaccaagatctcaaatgggctagattccctaagagtgatggtacaggtacaatttacacagaactggaaccaccttgtaggtttgttacagacacaccaaaagggcctaaagtgaaatacttgtacttcatcaaaggcttaaacaacctaaatagaggtatggtgctgggcagtttagctgctacagtacgtcttcaggctggaaatgctacagaagtacctgccaattcaactgtgctttccttctgtgcttttgcagtagaccctgctaaagcatataaggattacctagcaagtggaggacaaccaatcaccaactgtgtgaagatgttgtgtacacacactggtacaggacaggcaattactgtaacaccagaagctaacatggaccaagagtcctttggtggtgcttcatgttgtctgtattgtagatgccacattgaccatccaaatcctaaaggattctgtgacttgaaaggtaagtacgtccaaatacctaccacttgtgctaatgacccagtgggttttacacttagaaacacagtctgtaccgtctgcggaatgtggaaaggttatggctgtagttgtgaccaactccgcgaacccttgatgcagtctgcggatgcatcaacgtttttaaacgggtttgcggtgtaagtgcagcccgtcttacaccgtgcggcacaggcactagtactgatgtcgtctacagggcttttgatatttacaacgaaaaagttgctggttttgcaaagttcctaaaaactaattgctgtcgcttccaggagaaggatgaggaaggcaatttattagactcttactttgtagttaagaggcatactatgtctaactaccaacatgaagagactatttataacttggttaaagattgtccagcggttgctgtccatgactttttcaagtttagagtagatggtgacatggtaccacatatatcacgtcagcgtctaactaaatacacaatggctgatttagtctatgctctacgtcattttgatgagggtaattgtgatacattaaaagaaatactcgtcacatacaattgctgtgatgatgattatttcaataagaaggattggtatgacttcgtagagaatcctgacatcttacgcgtatatgctaacttaggtgagcgtgtacgccaatcattattaaagactgtacaattctgcgatgctatgcgtgatgcaggcattgtaggcgtactgacattagataatcaggatcttaatgggaactggtacgatttcggtgatttcgtacaagtagcaccaggctgcggagttcctattgtggattcatattactcattgctgatgcccatcctcactttgactagggcattggctgctgagtcccatatggatgctgatctcgcaaaaccacttattaagtgggatttgctgaaatatgattttacggaagagagactttgtctcttcgaccgttattttaaatattgggaccagacataccatcccaattgtattaactgtttggatgataggtgtatccttcattgtgcaaactttaatgtgttattttctactgtgtttccacctacaagttttggaccactagtaagaaaaatatttgtagatggtgttccttttgttgtttcaactggataccattttcgtgagttaggagtcgtacataatcaggatgtaaacttacatagctcgcgtctcagtttcaaggaacttttagtgtatgctgctgatccagctatgcatgcagcttctggcaatttattgctagataaacgcactacatgcttttcagtagctgcactaacaaacaatgttgcttttcaaactgtcaaacccggtaattttaataaagacttttatgactttgctgtgtctaaaggtttctttaaggaaggaagttctgttgaactaaaacacttcttctttgctcaggatggcaacgctgctatcagtgattatgactattatcgttataatctgccaacaatgtgtgatatcagacaactcctattcgtagttgaagttgttgataaatactttgattgttacgatggtggctgtattaatgccaaccaagtaatcgttaacaatctggataaatcagctggtttcccatttaataaatggggtaaggctagactttattatgactcaatgagttatgaggatcaagatgcacttttcgcgtatactaagcgtaatgtcatccctactataactcaaatgaatcttaagtatgccattagtgcaaagaatagagctcgcaccgtagctggtgtctctatctgtagtactatgacaaatagacagtttcatcagaaattattgaagtcaatagccgccactagaggagctactgtggtaattggaacaagcaagttttacggtggctggcataatatgttaaaaactgtttacagtgatgtagaaactccacaccttatgggttgggattatccaaaatgtgacagagccatgcctaacatgcttaggataatggcctctcttgttcttgctcgcaaacataacacttgctgtaacttatcacaccgtttctacaggttagctaacgagtgtgcgcaagtattaagtgagatggtcatgtgtggcggctcactatatgttaaaccaggtggaacatcatccggtgatgctacaactgcttatgctaatagtgtctttaacatttgtcaagctgttacagccaatgtaaatgcacttctttcaactgatggtaataagatagctgacaagtatgtccgcaatctacaacacaggctctatgagtgtctctatagaaatagggatgttgatcatgaattcgtggatgagttttacgcttacctgcgtaaacatttctccatgatgattctttctgatgatgccgttgtgtgctataacagtaactatgcggctcaaggtttagtagctagcattaagaactttaaggcagttctttattatcaaaataatgtgttcatgtctgaggcaaaatgttggactgagactgaccttactaaaggacctcacgaattttgctcacagcatacaatgctagttaaacaaggagatgattacgtgtacctgccttacccagatccatcaagaatattaggcgcaggctgttttgtcgatgatattgtcaaaacagatggtacacttatgattgaaaggttcgtgtcactggctattgatgcttacccacttacaaaacatcctaatcaggagtatgctgatgtctttcacttgtatttacaatacattagaaagttacatgatgagcttactggccacatgttggacatgtattccgtaatgctaactaatgataacacctcacggtactgggaacctgagttttatgaggctatgtacacaccacatacagtcttgcaggctgtaggtgcttgtgtattgtgcaattcacagacttcacttcgttgcggtgcctgtattaggagaccattcctatgttgcaagtgctgctatgaccatgtcatttcaacatcacacaaattagtgttgtctgttaatccctatgtttgcaatgccccaggttgtgatgtcactgatgtgacacaactgtatctaggaggtatgagctattattgcaagtcacataagcctcccattagttttccattatgtgctaatggtcaggtttttggtttatacaaaaacacatgtgtaggcagtgacaatgtcactgacttcaatgcgatagcaacatgtgattggactaatgctggcgattacatacttgccaacacttgtactgagagactcaagcttttcgcagcagaaacgctcaaagccactgaggaaacatttaagctgtcatatggtattgccactgtacgcgaagtactctctgacagagaattgcatctttcatgggaggttggaaaacctagaccaccattgaacagaaactatgtctttactggttaccgtgtaactaaaaatagtaaagtacagattggagagtacacctttgaaaaaggtgactatggtgatgctgttgtgtacagaggtactacgacatacaagttgaatgttggtgattactttgtgttgacatctcacactgtaatgccacttagtgcacctactctagtgccacaagagcactatgtgagaattactggcttgtacccaacactcaacatctcagatgagttttctagcaatgttgcaaattatcaaaaggtcggcatgcaaaagtactctacactccaaggaccacctggtactggtaagagtcattttgccatcggacttgctctctattacccatctgctcgcatagtgtatacggcatgctctcatgcagctgttgatgccctatgtgaaaaggcattaaaatatttgcccatagataaatgtagtagaatcatacctgcgcgtgcgcgcgtagagtgttttgataaattcaaagtgaattcaacactagaacagtatgttttctgcactgtaaatgcattgccagaaacaactgctgacattgtagtctttgatgaaatctctatggctactaattatgacttgagtgttgtcaatgctagacttcgtgcaaaacactacgtctatattggcgatcctgctcaattaccagccccccgcacattgctgactaaaggcacactagaaccagaatattttaattcagtgtgcagacttatgaaaacaataggtccagacatgttccttggaacttgtcgccgttgtcctgctgaaattgttgacactgtgagtgctttagtttatgacaataagctaaaagcacacaaggataagtcagctcaatgcttcaaaatgttctacaaaggtgttattacacatgatgtttcatctgcaatcaacagacctcaaataggcgttgtaagagaatttcttacacgcaatcctgcttggagaaaagctgtttttatctcaccttataattcacagaacgctgtagcttcaaaaatcttaggattgcctacgcagactgttgattcatcacagggttctgaatatgactatgtcatattcacacaaactactgaaacagcacactcttgtaatgtcaaccgcttcaatgtggctatcacaagggcaaaaattggcattttgtgcataatgtctgatagagatctttatgacaaactgcaatttacaagtctagaaataccacgtcgcaatgtggctacattacaagcagaaaatgtaactggactttttaaggactgtagtaagatcattactggtcttcatcctacacaggcacctacacacctcagcgttgatataaagttcaagactgaaggattatgtgttgacataccaggcataccaaaggacatgacctaccgtagactcatctctatgatgggtttcaaaatgaattaccaagtcaatggttaccctaatatgtttatcacccgcgaagaagctattcgtcacgttcgtgcgtggattggctttgatgtagagggctgtcatgcaactagagatgctgtgggtactaacctacctctccagctaggattttctacaggtgttaacttagtagctgtaccgactggttatgttgacactgaaaataacacagaattcaccagagttaatgcaaaacctccaccaggtgaccagtttaaacatcttataccactcatgtataaaggcttgccctggaatgtagtgcgtattaagatagtacaaatgctcagtgatacactgaaaggattgtcagacagagtcgtgttcgtcctttgggcgcatggctttgagcttacatcaatgaagtactttgtcaagattggacctgaaagaacgtgttgtctgtgtgacaaacgtgcaacttgcttttctacttcatcagatacttatgcctgctggaatcattctgtgggttttgactatgtctataacccatttatgattgatgttcagcagtggggctttacgggtaaccttcagagtaaccatgaccaacattgccaggtacatggaaatgcacatgtggctagttgtgatgctatcatgactagatgtttagcagtccatgagtgctttgttaagcgcgttgattggtctgttgaataccctattataggagatgaactgagggttaattctgcttgcagaaaagtacaacacatggttgtgaagtctgcattgcttgctgataagtttccagttcttcatgacattggaaatccaaaggctatcaagtgtgtgcctcaggctgaagtagaatggaagttctacgatgctcagccatgtagtgacaaagcttacaaaatagaggaactcttctattcttatgctacacatcacgataaattcactgatggtgtttgtttgttttggaattgtaacgttgatcgttacccagccaatgcaattgtgtgtaggtttgacacaagagtcttgtcaaacttgaacttaccaggctgtgatggtggtagtttgtatgtgaataagcatgcattccacactccagctttcgataaaagtgcatttactaatttaaagcaattgcctttcttttactattctgatagtccttgtgagtctcatggcaaacaagtagtgtcggatattgattatgttccactcaaatctgctacgtgtattacacgatgcaatttaggtggtgctgtttgcagacaccatgcaaatgagtaccgacagtacttggatgcatataatatgatgatttctgctggatttagcctatggatttacaaacaatttgatacttataacctgtggaatacatttaccaggttacagagtttagaaaatgtggcttataatgttgttaataaaggacactttgatggacacgccggcgaagcacctgtttccatcattaataatgctgtttacacaaaggtagatggtattgatgtggagatctttgaaaataagacaacacttcctgttaatgttgcatttgagctttgggctaagcgtaacattaaaccagtgccagagattaagatactcaataatttgggtgttgatatcgctgctaatactgtaatctgggactacaaaagagaagccccagcacatgtatctacaataggtgtctgcacaatgactgacattgccaagaaacctactgagagtgcttgttcttcacttactgtcttgtttgatggtagagtggaaggacaggtagacctttttagaaacgcccgtaatggtgttttaataacagaaggttcagtcaaaggtctaacaccttcaaagggaccagcacaagctagcgtcaatggagtcacattaattggagaatcagtaaaaacacagtttaactactttaagaaagtagacggcattattcaacagttgcctgaaacctactttactcagagcagagacttagaggattttaagcccagatcacaaatggaaactgactttctcgagctcgctatggatgaattcatacagcgatataagctcgagggctatgccttcgaacacatcgtttatggagatttcagtcatggacaacttggcggtcttcatttaatgataggcttagccaagcgctcacaagattcaccacttaaattagaggattttatccctatggacagcacagtgaaaaattacttcataacagatgcgcaaacaggttcatcaaaatgtgtgtgttctgtgattgatcttttacttgatgactttgtcgagataataaagtcacaagatttgtcagtgatttcaaaagtggtcaaggttacaattgactatgctgaaatttcattcatgctttggtgtaaggatggacatgttgaaaccttctacccaaaactacaagcaagtcaagcgtggcaaccaggtgttgcgatgcctaacttgtacaagatgcaaagaatgcttcttgaaaagtgtgaccttcagaattatggtgaaaatgctgttataccaaaaggaataatgatgaatgtcgcaaagtatactcaactgtgtcaatacttaaatacacttactttagctgtaccctacaacatgagagttattcactttggtgctggctctgataaaggagttgcaccaggtacagctgtgctcagacaatggttgccaactggcacactacttgtcgattcagatcttaatgacttcgtctccgacgcagattctactttaattggagactgtgcaacagtacatacggctaataaatgggaccttattattagcgatatgtatgaccctaggaccaaacatgtgacaaaagagaatgactctaaagaagggtttttcacttatctgtgtggatttataaagcaaaaactagccctgggtggttctatagctgtaaagataacagagcattcttggaatgctgacctttacaagcttatgggccatttctcatggtggacagcttttgttacaaatgtaaatgcatcatcatcggaagcatttttaattggggctaactatcttggcaagccgaaggaacaaattgatggctataccatgcatgctaactacattttctggaggaacacaaatcctatccagttgtcttcctattcactctttgacatgagcaaatttcctcttaaattaagaggaactgctgtaatgtctcttaaggagaatcaaatcaatgatatgatttattctcttctggaaaaaggtaggcttatcattagagaaaacaacagagttgtggtttcaagtgatattcttgttaacaactaaacgaacatgtttattttcttattatttcttactctcactagtggtagtgaccttgaccggtgcaccacttttgatgatgttcaagctcctaattacactcaacatacttcatctatgaggggggtttactatcctgatgaaatttttagatcagacactctttatttaactcaggatttatttcttccattttattctaatgttacagggtttcatactattaatcatacgtttggcaaccctgtcataccttttaaggatggtatttattttgctgccacagagaaatcaaatgttgtccgtggttgggtttttggttctaccatgaacaacaagtcacagtcggtgattattattaacaattctactaatgttgttatacgagcatgtaactttgaattgtgtgacaaccctttctttgctgtttctaaacccatgggtacacagacacatactatgatattcgataatgcatttaattgcactttcgagtacatatctgatgccttttcgcttgatgtttcagaaaagtcaggtaattttaaacacttacgagagtttgtgtttaaaaataaagatgggtttctctatgtttataagggctatcaacctatagatgtagttcgtgatctaccttctggttttaacactttgaaacctatttttaagttgcctcttggtattaacattacaaattttagagccattcttacagccttttcacctgctcaagacatttggggcacgtcagctgcagcctattttgttggctatttaaagccaactacatttatgctcaagtatgatgaaaatggtacaatcacagatgctgttgattgttctcaaaatccacttgctgaactcaaatgctctgttaagagctttgagattgacaaaggaatttaccagacctctaatttcagggttgttccctcaggagatgttgtgagattccctaatattacaaacttgtgtccttttggagaggtttttaatgctactaaattcccttctgtctatgcatgggagagaaaaaaaatttctaattgtgttgctgattactctgtgctctacaactcaacatttttttcaacctttaagtgctatggcgtttctgccactaagttgaatgatctttgcttctccaatgtctatgcagattcttttgtagtcaagggagatgatgtaagacaaatagcgccaggacaaactggtgttattgctgattataattataaattgccagatgatttcatgggttgtgtccttgcttggaatactaggaacattgatgctacttcaactggtaattataattataaatataggtatcttagacatggcaagcttaggccctttgagagagacatatctaatgtgcctttctcccctgatggcaaaccttgcaccccacctgctcttaattgttattggccattaaatgattatggtttttacaccactactggcattggctaccaaccttacagagttgtagtactttcttttgaacttttaaatgcaccggccacggtttgtggaccaaaattatccactgaccttattaagaaccagtgtgtcaattttaattttaatggactcactggtactggtgtgttaactccttcttcaaagagatttcaaccatttcaacaatttggccgtgatgtttctgatttcactgattccgttcgagatcctaaaacatctgaaatattagacatttcaccttgctcttttgggggtgtaagtgtaattacacctggaacaaatgcttcatctgaagttgctgttctatatcaagatgttaactgcactgatgtttctacagcaattcatgcagatcaactcacaccagcttggcgcatatattctactggaaacaatgtattccagactcaagcaggctgtcttataggagctgagcatgtcgacacttcttatgagtgcgacattcctattggagctggcatttgtgctagttaccatacagtttctttattacgtagtactagccaaaaatctattgtggcttatactatgtctttaggtgctgatagttcaattgcttactctaataacaccattgctatacctactaacttttcaattagcattactacagaagtaatgcctgtttctatggctaaaacctccgtagattgtaatatgtacatctgcggagattctactgaatgtgctaatttgcttctccaatatggtagcttttgcacacaactaaatcgtgcactctcaggtattgctgctgaacaggatcgcaacacacgtgaagtgttcgctcaagtcaaacaaatgtacaaaaccccaactttgaaatattttggtggttttaatttttcacaaatattacctgaccctctaaagccaactaagaggtcttttattgaggacttgctctttaataaggtgacactcgctgatgctggcttcatgaagcaatatggcgaatgcctaggtgatattaatgctagagatctcatttgtgcgcagaagttcaatggacttacagtgttgccacctctgctcactgatgatatgattgctgcctacactgctgctctagttagtggtactgccactgctggatggacatttggtgctggcgctgctcttcaaataccttttgctatgcaaatggcatataggttcaatggcattggagttacccaaaatgttctctatgagaaccaaaaacaaatcgccaaccaatttaacaaggcgattagtcaaattcaagaatcacttacaacaacatcaactgcattgggcaagctgcaagacgttgttaaccagaatgctcaagcattaaacacacttgttaaacaacttagctctaattttggtgcaatttcaagtgtgctaaatgatatcctttcgcgacttgataaagtcgaggcggaggtacaaattgacaggttaattacaggcagacttcaaagccttcaaacctatgtaacacaacaactaatcagggctgctgaaatcagggcttctgctaatcttgctgctactaaaatgtctgagtgtgttcttggacaatcaaaaagagttgacttttgtggaaagggctaccaccttatgtccttcccacaagcagccccgcatggtgttgtcttcctacatgtcacgtatgtgccatcccaggagaggaacttcaccacagcgccagcaatttgtcatgaaggcaaagcatacttccctcgtgaaggtgtttttgtgtttaatggcacttcttggtttattacacagaggaacttcttttctccacaaataattactacagacaatacatttgtctcaggaaattgtgatgtcgttattggcatcattaacaacacagtttatgatcctctgcaacctgagcttgactcattcaaagaagagctggacaagtacttcaaaaatcatacatcaccagatgttgatcttggcgacatttcaggcattaacgcttctgtcgtcaacattcaaaaagaaattgaccgcctcaatgaggtcgctaaaaatttaaatgaatcactcattgaccttcaagaattgggaaaatatgagcaatatattaaatggccttggtatgtttggctcggcttcattgctggactaattgccatcgtcatggttacaatcttgctttgttgcatgactagttgttgcagttgcctcaagggtgcatgctcttgtggttcttgctgcaagtttgatgaggatgactctgagccagttctcaagggtgtcaaattacattacacataaacgaacttatggatttgtttatgagattttttactcttggatcaattactgcacagccagtaaaaattgacaatgcttctcctgcaagtactgttcatgctacagcaacgataccgctacaagcctcactccctttcggatggcttgttattggcgttgcatttcttgctgtttttcagagcgctaccaaaataattgcgctcaataaaagatggcagctagccctttataagggcttccagttcatttgcaatttactgctgctatttgttaccatctattcacatcttttgcttgtcgctgcaggtatggaggcgcaatttttgtacctctatgccttgatatattttctacaatgcatcaacgcatgtagaattattatgagatgttggctttgttggaagtgcaaatccaagaacccattactttatgatgccaactactttgtttgctggcacacacataactatgactactgtataccatataacagtgtcacagatacaattgtcgttactgaaggtgacggcatttcaacaccaaaactcaaagaagactaccaaattggtggttattctgaggataggcactcaggtgttaaagactatgtcgttgtacatggctatttcaccgaagtttactaccagcttgagtctacacaaattactacagacactggtattgaaaatgctacattcttcatctttaacaagcttgttaaagacccaccgaatgtgcaaatacacacaatcgacggctcttcaggagttgctaatccagcaatggatccaatttatgatgagccgacgacgactactagcgtgcctttgtaagcacaagaaagtgagtacgaacttatgtactcattcgtttcggaagaaacaggtacgttaatagttaatagcgtacttctttttcttgctttcgtggtattcttgctagtcacactagccatccttactgcgcttcgattgtgtgcgtactgctgcaatattgttaacgtgagtttagtaaaaccaacggtttacgtctactcgcgtgttaaaaatctgaactcttctgaaggagttcctgatcttctggtctaaacgaactaactattattattattctgtttggaactttaacattgcttatcatggcagacaacggtactattaccgttgaggagcttaaacaactcctggaacaatggaacctagtaataggtttcctatgcctagcctggattatgttactacaatttgcctattctaatcggaacaggtttttgtacataataaagcttgttttcctctggctcttgtggccagtaacacttgcttgttttgtgcttgctgctgtctacagaattaattgggtgactggcgggattgcgattgcaatggcttgtattgtaggcttgatgtggcttagctacttcgttgcttccttcaggctgtttgctcgtacccgctcaatgtggtcattcaacccagaaacaaacattcttctcaatgtgcctctccgggggacaattgtgaccagaccgctcatggaaagtgaacttgtcattggtgctgtgatcattcgtggtcacttgcgaatggccggacactccctagggcgctgtgacattaaggacctgccaaaagagatcactgtggctacatcacgaacgctttcttattacaaattaggagcgtcgcagcgtgtaggcactgattcaggttttgctgcatacaaccgctaccgtattggaaactataaattaaatacagaccacgccggtagcaacgacaatattgctttgctagtacagtaagtgacaacagatgtttcatcttgttgacttccaggttacaatagcagagatattgattatcattatgaggactttcaggattgctatttggaatcttgacgttataataagttcaatagtgagacaattatttaagcctctaactaagaagaattattcggagttagatgatgaagaacctatggagttagattatccataaaacgaacatgaaaattattctcttcctgacattgattgtatttacatcttgcgagctatatcactatcaggagtgtgttagaggtacgactgtactactaaaagaaccttgcccatcaggaacatacgagggcaattcaccatttcaccctcttgctgacaataaatttgcactaacttgcactagcacacactttgcttttgcttgtgctgacggtactcgacatacctatcagctgcgtgcaagatcagtttcaccaaaacttttcatcagacaagaggaggttcaacaagagctctactcgccactttttctcattgttgctgctctagtatttttaatactttgcttcaccattaagagaaagacagaatgaatgagctcactttaattgacttctatttgtgctttttagcctttctgctattccttgttttaataatgcttattatattttggttttcactcgaaatccaggatctagaagaaccttgtaccaaagtctaaacgaacatgaaacttctcattgttttgacttgtatttctctatgcagttgcatatgcactgtagtacagcgctgtgcatctaataaacctcatgtgcttgaagatccttgtaaggtacaacactaggggtaatacttatagcactgcttggctttgtgctctaggaaaggttttaccttttcatagatggcacactatggttcaaacatgcacacctaatgttactatcaactgtcaagatccagctggtggtgcgcttatagctaggtgttggtaccttcatgaaggtcaccaaactgctgcatttagagacgtacttgttgttttaaataaacgaacaaattaaaatgtctgataatggaccccaatcaaaccaacgtagtgccccccgcattacatttggtggacccacagattcaactgacaataaccagaatggaggacgcaatggggcaaggccaaaacagcgccgaccccaaggtttacccaataatactgcgtcttggttcacagctctcactcagcatggcaaggaggaacttagattccctcgaggccagggcgttccaatcaacaccaatagtggtccagatgaccaaattggctactaccgaagagctacccgacgagttcgtggtggtgacggcaaaatgaaagagctcagccccagatggtacttctattacctaggaactggcccagaagcttcacttccctacggcgctaacaaagaaggcatcgtatgggttgcaactgagggagccttgaatacacccaaagaccacattggcacccgcaatcctaataacaatgctgccaccgtgctacaacttcctcaaggaacaacattgccaaaaggcttctacgcagagggaagcagaggcggcagtcaagcctcttctcgctcctcatcacgtagtcgcggtaattcaagaaattcaactcctggcagcagtaggggaaattctcctgctcgaatggctagcggaggtggtgaaactgccctcgcgctattgctgctagacagattgaaccagcttgagagcaaagtttctggtaaaggccaacaacaacaaggccaaactgtcactaagaaatctgctgctgaggcatctaaaaagcctcgccaaaaacgtactgccacaaaacagtacaacgtcactcaagcatttgggagacgtggtccagaacaaacccaaggaaatttcggggaccaagacctaatcagacaaggaactgattacaaacattggccgcaaattgcacaatttgctccaagtgcctctgcattctttggaatgtcacgcattggcatggaagtcacaccttcgggaacatggctgacttatcatggagccattaaattggatgacaaagatccacaattcaaagacaacgtcatactgctgaacaagcacattgacgcatacaaaacattcccaccaacagagcctaaaaaggacaaaaagaaaaagactgatgaagctcagcctttgccgcagagacaaaagaagcagcccactgtgactcttcttcctgcggctgacatggatgatttctccagacaacttcaaaattccatgagtggagcttctgctgattcaactcaggcataaacactcatgatgaccacacaaggcagatgggctatgtaaacgttttcgcaattccgtttacgatacatagtctactcttgtgcagaatgaattctcgtaactaaacagcacaagtaggtttagttaactttaatctcacatagcaatctttaatcaatgtgtaacattagggaggacttgaaagagccaccacattttcatcgaggccacgcggagtacgatcgagggtacagtgaataatgctagggagagctgcctatatggaagagccctaatgtgtaaaattaattttagtagtgctatccccatgtgattttaatagcttcttaggagaatgac

SEQ ID NO: 79 - DNA, 29727 bp, Coronavirus
atattaggtttttacctacccaggaaaagccaaccaacctcgatctcttgtagatctgttctctaaacgaactttaaaatctgtgtagctgtcgctcggctgcatgcctagtgcacctacgcagtataaacaataataaattttactgtcgttgacaagaaacgagtaactcgtccctcttctgcagactgcttacggtttcgtccgtgttgcagtcgatcatcagcatacctaggtttcgtccgggtgtgaccgaaaggtaagatggagagccttgttcttggtgtcaacgagaaaacacacgtccaactcagtttgcctgtccttcaggttagagacgtgctagtgcgtggcttcggggactctgtggaagaggccctatcggaggcacgtgaacacctcaaaaatggcacttgtggtctagtagagctggaaaaaggcgtactgccccagcttgaacagccctatgtgttcattaaacgttctgatgccttaagcaccaatcacggccacaaggtcgttgagctggttgcagaaatggacggcattcagtacggtcgtagcggtataacactgggagtactcgtgccacatgtgggcgaaaccccaattgcataccgcaatgttcttcttcgtaagaacggtaataagggagccggtggtcatagctatggcatcgatctaaagtcttatgacttaggtgacgagcttggcactgatcccattgaagattatgaacaaaactggaacactaagcatggcagtggtgcactccgtgaactcactcgtgagctcaatggaggtgcagtcactcgctatgtcgacaacaatttctgtggcccagatgggtaccctcttgattgcatcaaagattttctcgcacgcgcgggcaagtcaatgtgcactctttccgaacaacttgattacatcgagtcgaagagaggtgtctactgctgccgtgaccatgagcatgaaattgcctggttcactgagcgctctgataagagctacgagcaccagacacccttcgaaattaagagtgccaagaaatttgacactttcaaaggggaatgcccaaagtttgtgtttcctcttaactcaaaagtcaaagtcattcaaccacgtgttgaaaagaaaaagactgagggtttcatggggcgtatacgctctgtgtaccctgttgcatctccacaggagtgtaacaatatgcacttgtctaccttgatgaaatgtaatcattgcgatgaagtttcatggcagacgtgcgactttctgaaagccacttgtgaacattgtggcactgaaaatttagttattgaaggacctactacatgtgggtacctacctactaatgctgtagtgaaaatgccatgtcctgcctgtcaagacccagagattggacctgagcatagtgttgcagattatcacaaccactcaaacattgaaactcgactccgcaagggaggtaggactagatgttttggaggctgtgtgtttgcctatgttggctgctataataagcgtgcctactgggttcctcgtgctagtgctgatattggctcaggccatactggcattactggtgacaatgtggagaccttgaatgaggatctccttgagatactgagtcgtgaacgtgttaacattaacattgttggcgattttcatttgaatgaagaggttgccatcattttggcatctttctctgcttctacaagtgcctttattgacactataaagagtcttgattacaagtctttcaaaaccattgttgagtcctgcggtaactataaagttaccaagggaaagcccgtaaaaggtgcttggaacattggacaacagagatcagttttaacaccactgtgtggttttccctcacaggctgctggtgttatcagatcaatttttgcgcgcacacttgatgcagcaaaccactcaattcctgatttgcaaagagcagctgtcaccatacttgatggtatttctgaacagtcattacgtcttgtcgacgccatggtttatacttcagacctgctcaccaacagtgtcattattatggcatatgtaactggtggtcttgtacaacagacttctcagtggttgtctaatcttttgggcactactgttgaaaaactcaggcctatctttgaatggattgaggcgaaacttagtgcaggagttgaatttctcaaggatgcttgggagattctcaaatttctcattacaggtgtttttgacatcgtcaagggtcaaatacaggttgcttcagataacatcaaggattgtgtaaaatgcttcattgatgttgttaacaaggcactcgaaatgtgcattgatcaagtcactatcgctggcgcaaagttgcgatcactcaacttaggtgaagtcttcatcgctcaaagcaagggactttaccgtcagtgtatacgtggcaaggagcagctgcaactactcatgcctcttaaggcaccaaaagaagtaacctttcttgaaggtgattcacatgacacagtacttacctctgaggaggttgttctcaagaacggtgaactcgaagcactcgagacgcccgttgatagcttcacaaatggagctatcgttggcacaccagtctgtgtaaatggcctcatgctcttagagattaaggacaaagaacaatactgcgcattgtctcctggtttactggctacaaacaatgtctttcgcttaaaagggggtgcaccaattaaaggtgtaacctttggagaagatactgtttgggaagttcaaggttacaagaatgtgagaatcacatttgagcttgatgaacgtgttgacaaagtgcttaatgaaaagtgctctgtctacactgttgaatccggtaccgaagttactgagtttgcatgtgttgtagcagaggctgttgtgaagactttacaaccagtttctgatctccttaccaacatgggtattgatcttgatgagtggagtgtagctacattctacttatttgatgatgctggtgaagaaaacttttcatcacgtatgtattgttccttttaccctccagatgaggaagaagaggacgatgcagagtgtgaggaagaagaaattgatgaaacctgtgaacatgagtacggtacagaggatgattatcaaggtctccctctggaatttggtgcctcagctgaaacagttcgagttgaggaagaagaagaggaagactggctggatgatactactgagcaatcagagattgagccagaaccagaacctacacctgaagaaccagttaatcagtttactggttatttaaaacttactgacaatgttgccattaaatgtgttgacatcgttaaggaggcacaaagtgctaatcctatggtgattgtaaatgctgctaacatacacctgaaacatggtggtggtgtagcaggtgcactcaacaaggcaaccaatggtgccatgcaaaaggagagtgatgattacattaagctaaatggccctcttacagtaggagggtcttgtttgctttctggacataatcttgctaagaagtgtctgcatgttgttggacctaacctaaatgcaggtgaggacatccagcttcttaaggcagcatatgaaaatttcaattcacaggacatcttacttgcaccattgttgtcagcaggcatatttggtgctaaaccacttcagtctttacaagtgtgcgtgcagacggttcgtacacaggtttatattgcagtcaatgacaaagctctttatgagcaggttgtcatggattatcttgataacctgaagcctagagtggaagcacctaaacaagaggagccaccaaacacagaagattccaaaactgaggagaaatccgtcgtacagaagcctgtcgatgtgaagccaaaaattaaggcctgcattgatgaggttaccacaacactggaagaaactaagtttcttaccaataagttactcttgtttgctgatatcaatggtaagctttaccatgattctcagaacatgcttagaggtgaagatatgtctttccttgagaaggatgcaccttacatggtaggtgatgttatcactagtggtgatatcacttgtgttgtaataccctccaaaaaggctggtggcactactgagatgctctcaagagctttgaagaaagtgccagttgatgagtatataaccacgtaccctggacaaggatgtgctggttatacacttgaggaagctaagactgctcttaagaaatgcaaatctgcattttatgtactaccttcagaagcacctaatgctaaggaagagattctaggaactgtatcctggaatttgagagaaatgcttgctcatgctgaagagacaagaaaattaatgcctatatgcatggatgttagagccataatggcaaccatccaacgtaagtataaaggaattaaaattcaagagggcatcgttgactatggtgtccgattcttcttttatactagtaaagagcctgtagcttctattattacgaagctgaactctctaaatgagccgcttgtcacaatgccaattggttatgtgacacatggttttaatcttgaagaggctgcgcgctgtatgcgttctcttaaagctcctgccgtagtgtcagtatcatcaccagatgctgttactacatataatggatacctcacttcgtcatcaaagacatctgaggagcactttgtagaaacagtttctttggctggctcttacagagattggtcctattcaggacagcgtacagagttaggtgttgaatttcttaagcgtggtgacaaaattgtgtaccacactctggagagccccgtcgagtttcatcttgacggtgaggttctttcacttgacaaactaaagagtctcttatccctgcgggaggttaagactataaaagtgttcacaactgtggacaacactaatctccacacacagcttgtggatatgtctatgacatatggacagcagtttggtccaacatacttggatggtgctgatgttacaaaaattaaacctcatgtaaatcatgagggtaagactttctttgtactacctagtgatgacacactacgtagtgaagctttcgagtactaccatactcttgatgagagttttcttggtaggtacatgtctgctttaaaccacacaaagaaatggaaatttcctcaagttggtggtttaacttcaattaaatgggctgataacaattgttatttgtctagtgttttattagcacttcaacagcttgaagtcaaattcaatgcaccagcacttcaagaggcttattatagagcccgtgctggtgatgctgctaacttttgtgcactcatactcgcttacagtaataaaactgttggcgagcttggtgatgtcagagaaactatgacccatcttctacagcatgctaatttggaatctgcaaagcgagttcttaatgtggtgtgtaaacattgtggtcagaaaactactaccttaacgggtgtagaagctgtgatgtatatgggtactctatcttatgataatcttaagacaggtgtttccattccatgtgtgtgtggtcgtgatgctacacaatatctagtacaacaagagtcttcttttgttatgatgtctgcaccacctgctgagtataaattacagcaaggtacattcttatgtgcgaatgagtacactggtaactatcagtgtggtcattacactcatataactgctaaggagaccctctatcgtattgacggagctcaccttacaaagatgtcagagtacaaaggaccagtgactgatgttttctacaaggaaacatcttacactacaaccatcaagcctgtgtcgtataaactcgatggagttacttacacagagattgaaccaaaattggatgggtattataaaaaggataatgcttactatacagagcagcctatagaccttgtaccaactcaaccattaccaaatgcgagttttgataatttcaaactcacatgttctaacacaaaatttgctgatgatttaaatcaaatgacaggcttcacaaagccagcttcacgagagctatctgtcacattcttcccagacttgaatggcgatgtagtggctattgactatagacactattcagcgagtttcaagaaaggtgctaaattactgcataagccaattgtttggcacattaaccaggctacaaccaagacaacgttcaaaccaaacacttggtgtttacgttgtctttggagtacaaagccagtagatacttcaaattcatttgaagttctggcagtagaagacacacaaggaatggacaatcttgcttgtgaaagtcaacaacccacctctgaagaagtagtggaaaatcctaccatacagaaggaagtcatagagtgtgacgtgaaaactaccgaagttgtaggcaatgtcatacttaaaccatcagatgaaggtgttaaagtaacacaagagttaggtcatgaggatcttatggctgcttatgtggaaaacacaagcattaccattaagaaacctaatgagctttcactagccttaggtttaaaaacaattgccactcatggtattgctgcaattaatagtgttccttggagtaaaattttggcttatgtcaaaccattcttaggacaagcagcaattacaacatcaaattgcgctaagagattagcacaacgtgtgtttaacaattatatgccttatgtgtttacattattgttccaattgtgtacttttactaaaagtaccaattctagaattagagcttcactacctacaactattgctaaaaatagtgttaagagtgttgctaaattatgtttggatgccggcattaattatgtgaagtcacccaaattttctaaattgttcacaatcgctatgtggctattgttgttaagtatttgcttaggttctctaatctgtgtaactgctgcttttggtgtactcttatctaattttggtgctccttcttattgtaatggcgttagagaattgtatcttaattcgtctaacgttactactatggatttctgtgaaggttcttttccttgcagcatttgtttaagtggattagactcccttgattcttatccagctcttgaaaccattcaggtgacgatttcatcgtacaagctagacttgacaattttaggtctggccgctgagtgggttttggcatatatgttgttcacaaaattcttttatttattaggtctttcagctataatgcaggtgttctttggctattttgctagtcatttcatcagcaattcttggctcatgtggtttatcattagtattgtacaaatggcacccgtttctgcaatggttaggatgtacatcttctttgcttctttctactacatatggaagagctatgttcatatcatggatggttgcacctcttcgacttgcatgatgtgctataagcgcaatcgtgccacacgcgttgagtgtacaactattgttaatggcatgaagagatctttctatgtctatgcaaatggaggccgtggcttctgcaagactcacaattggaattgtctcaattgtgacacattttgcactggtagtacattcattagtgatgaagttgctcgtgatttgtcactccagtttaaaagaccaatcaaccctactgaccagtcatcgtatattgttgatagtgttgctgtgaaaaatggcgcgcttcacctctactttgacaaggctggtcaaaagacctatgagagacatccgctctcccattttgtcaatttagacaatttgagagctaacaacactaaaggttcactgcctattaatgtcatagtttttgatggcaagtccaaatgcgacgagtctgcttctaagtctgcttctgtgtactacagtcagctgatgtgccaacctattctgttgcttgaccaagctcttgtatcagacgttggagatagtactgaagtttccgttaagatgtttgatgcttatgtcgacaccttttcagcaacttttagtgttcctatggaaaaacttaaggcacttgttgctacagctcacagcgagttagcaaagggtgtagctttagatggtgtcctttctacattcgtgtcagctgcccgacaaggtgttgttgataccgatgttgacacaaaggatgttattgaatgtctcaaactttcacatcactctgacttagaagtgacaggtgacagttgtaacaatttcatgctcacctataataaggttgaaaacatgacgcccagagatcttggcgcatgtattgactgtaatgcaaggcatatcaatgcccaagtagcaaaaagtcacaatgtttcactcatctggaatgtaaaagactacatgtctttatctgaacagctgcgtaaacaaattcgtagtgctgccaagaagaacaacataccttttagactaacttgtgctacaactagacaggttgtcaatgtcataactactaaaatctcactcaagggtggtaagattgttagtacttgttttaaacttatgcttaaggccacattattgtgcgttcttgctgcattggtttgttatatcgttatgccagtacatacattgtcaatccatgatggttacacaaatgaaatcattggttacaaagccattcaggatggtgtcactcgtgacatcatttctactgatgattgttttgcaaataaacatgctggttttgacgcatggtttagccagcgtggtggttcatacaaaaatgacaaaagctgccctgtagtagctgctatcattacaagagagattggtttcatagtgcctggcttaccgggtactgtgctgagagcaatcaatggtgacttcttgcattttctacctcgtgtttttagtgctgttggcaacatttgctacacaccttccaaactcattgagtatagtgattttgctacctctgcttgcgttcttgctgctgagtgtacaatttttaaggatgctatgggcaaacctgtgccatattgttatgacactaatttgctagagggttctatttcttatagtgagcttcgtccagacactcgttatgtgcttatggatggttccatcatacagtttcctaacacttacctggagggttctgttagagtagtaacaacttttgatgctgagtactgtagacatggtacatgcgaaaggtcagaagtaggtatttgcctatctaccagtggtagatgggttcttaataatgagcattacagagctctatcaggagttttctgtggtgttgatgcgatgaatctcatagctaacatctttactcctcttgtgcaacctgtgggtgctttagatgtgtctgcttcagtagtggctggtggtattattgccatattggtgacttgtgctgcctactactttatgaaattcagacgtgtttttggtgagtacaaccatgttgttgctgctaatgcacttttgtttttgatgtctttcactatactctgtctggtaccagcttacagctttctgccgggagtctactcagtcttttacttgtacttgacattctatttcaccaatgatgtttcattcttggctcaccttcaatggtttgccatgttttctcctattgtgcctttttggataacagcaatctatgtattctgtatttctctgaagcactgccattggttctttaacaactatcttaggaaaagagtcatgtttaatggagttacatttagtaccttcgaggaggctgctttgtgtacctttttgctcaacaaggaaatgtacctaaaattgcgtagcgagacactgttgccacttacacagtataacaggtatcttgctctatataacaagtacaagtatttcagtggagccttagatactaccagctatcgtgaagcagcttgctgccacttagcaaaggctctaaatgactttagcaactcaggtgctgatgttctctaccaaccaccacagacatcaatcacttctgctgttctgcagagtggttttaggaaaatggcattcccgtcaggcaaagttgaagggtgcatggtacaagtaacctgtggaactacaactcttaatggattgtggttggatgacacagtatactgtccaagacatgtcatttgcacagcagaagacatgcttaatcctaactatgaagatctgctcattcgcaaatccaaccatagctttcttgttcaggctggcaatgttcaacttcgtgttattggccattctatgcaaaattgtctgcttaggcttaaagttgatacttctaaccctaagacacccaagtataaatttgtccgtatccaacctggtcaaacattttcagttctagcatgctacaatggttcaccatctggtgtttatcagtgtgccatgagacctaatcataccattaaaggttctttccttaatggatcatgtggtagtgttggttttaacattgattatgattgcgtgtctttctgctatatgcatcatatggagcttccaacaggagtacacgctggtactgacttagaaggtaaattctatggtccatttgttgacagacaaactgcacaggctgcaggtacagacacaaccataacattaaatgttttggcatggctgtatgctgctgttatcaatggtgataggtggtttcttaatagattcaccactactttgaatgactttaaccttgtggcaatgaagtacaactatgaacctttgacacaagatcatgttgacatattgggacctctttctgctcaaacaggaattgccgtcttagatatgtgtgctgctttgaaagagctgctgcagaatggtatgaatggtcgtactatccttggtagcactattttagaagatgagtttacaccatttgatgttgttagacaatgctctggtgttaccttccaaggtaagttcaagaaaattgttaagggcactcatcattggatgcttttaactttcttgacatcactattgattcttgttcaaagtacacagtggtcactgtttttctttgtttacgagaatgctttcttgccatttactcttggtattatggcaattgctgcatgtgctatgctgcttgttaagcataagcacgcattcttgtgcttgtttctgttaccttctcttgcaacagttgcttactttaatatggtctacatgcctgctagctgggtgatgcgtatcatgacatggcttgaattggctgacactagcttgtctggttataggcttaaggattgtgttatgtatgcttcagctttagttttgcttattctcatgacagctcgcactgtttatgatgatgctgctagacgtgtttggacactgatgaatgtcattacacttgtttacaaagtctactatggtaatgctttagatcaagctatttccatgtgggccttagttatttctgtaacctctaactattctggtgtcgttacgactatcatgtttttagctagagctatagtgtttgtgtgtgttgagtattatccattgttatttattactggcaacaccttacagtgtatcatgcttgtttattgtttcttaggctattgttgctgctgctactttggccttttctgtttactcaaccgttacttcaggcttactcttggtgtttatgactacttggtctctacacaagaatttaggtatatgaactcccaggggcttttgcctcctaagagtagtattgatgctttcaagcttaacattaagttgttgggtattggaggtaaaccatgtatcaaggttgctactgtacagtctaaaatgtctgacgtaaagtgcacatctgtggtactgctctcggttcttcaacaacttagagtagagtcatcttctaaattgtgggcacaatgtgtacaactccacaatgatattcttcttgcaaaagacacaactgaagctttcgagaagatggtttctcttttgtctgttttgctatccatgcagggtgctgtagacattaataggttgtgcgaggaaatgctcgataaccgtgctactcttcaggctattgcttcagaatttagttctttaccatcatatgccgcttatgccactgcccaggaggcctatgagcaggctgtagctaatggtgattctgaagtcgttctcaaaaagttaaagaaatctttgaatgtggctaaatctgagtttgaccgtgatgctgccatgcaacgcaagttggaaaagatggcagatcaggctatgacccaaatgtacaaacaggcaagatctgaggacaagagggcaaaagtaactagtgctatgcaaacaatgctcttcactatgcttaggaagcttgataatgatgcacttaacaacattatcaacaatgcgcgtgatggttgtgttccactcaacatcataccattgactacagcagccaaactcatggttgttgtccctgattatggtacctacaagaacacttgtgatggtaacacctttacatatgcatctgcactctgggaaatccagcaagttgttgatgcggatagcaagattgttcaacttagtgaaattaacatggacaattcaccaaatttggcttggcctcttattgttacagctctaagagccaactcagctgttaaactacagaataatgaactgagtccagtagcactacgacagatgtcctgtgcggctggtaccacacaaacagcttgtactgatgacaatgcacttgcctactataacaattcgaagggaggtaggtttgtgctggcattactatcagaccaccaagatctcaaatgggctagattccctaagagtgatggtacaggtacaatttacacagaactggaaccaccttgtaggtttgttacagacacaccaaaagggcctaaagtgaaatacttgtacttcatcaaaggcttaaacaacctaaatagaggtatggtgctgggcagtttagctgctacagtacgtcttcaggctggaaatgctacagaagtacctgccaattcaactgtgctttccttctgtgcttttgcagtagaccctgctaaagcatataaggattacctagcaagtggaggacaaccaatcaccaactgtgtgaagatgttgtgtacacacactggtacaggacaggcaattactgtaacaccagaagctaacatggaccaagagtcctttggtggtgcttcatgttgtctgtattgtagatgccacattgaccatccaaatcctaaaggattctgtgacttgaaaggtaagtacgtccaaatacctaccacttgtgctaatgacccagtgggttttacacttagaaacacagtctgtaccgtctgcggaatgtggaaaggttatggctgtagttgtgaccaactccgcgaacccttgatgcagtctgcggatgcatcaacgtttttaaacgggtttgcggtgtaagtgcagcccgtcttacaccgtgcggcacaggcactagtactgatgtcgtctacagggcttttgatatttacaacgaaaaagttgctggttttgcaaagttcctaaaaactaattgctgtcgcttccaggagaaggatgaggaaggcaatttattagactcttactttgtagttaagaggcatactatgtctaactaccaacatgaagagactatttataacttggttaaagattgtccagcggttgctgtccatgactttttcaagtttagagtagatggtgacatggtaccacatatatcacgtcagcgtctaactaaatacacaatggctgatttagtctatgctctacgtcattttgatgagggtaattgtgatacattaaaagaaatactcgtcacatacaattgctgtgatgatgattatttcaataagaaggattggtatgacttcgtagagaatcctgacatcttacgcgtatatgctaacttaggtgagcgtgtacgccaatcattattaaagactgtacaattctgcgatgctatgcgtgatgcaggcattgtaggcgtactgacattagataatcaggatcttaatgggaactggtacgatttcggtgatttcgtacaagtagcaccaggctgcggagttcctattgtggattcatattactcattgctgatgcccatcctcactttgactagggcattggctgctgagtcccatatggatgctgatctcgcaaaaccacttattaagtgggatttgctgaaatatgattttacggaagagagactttgtctcttcgaccgttattttaaatattgggaccagacataccatcccaattgtattaactgtttggatgataggtgtatccttcattgtgcaaactttaatgtgttattttctactgtgtttccacctacaagttttggaccactagtaagaaaaatatttgtagatggtgttccttttgttgtttcaactggataccattttcgtgagttaggagtcgtacataatcaggatgtaaacttacatagctcgcgtctcagtttcaaggaacttttagtgtatgctgctgatccagctatgcatgcagcttctggcaatttattgctagataaacgcactacatgcttttcagtagctgcactaacaaacaatgttgcttttcaaactgtcaaacccggtaattttaataaagacttttatgactttgctgtgtctaaaggtttctttaaggaaggaagttctgttgaactaaaacacttcttctttgctcaggatggcaacgctgctatcagtgattatgactattatcgttataatctgccaacaatgtgtgatatcagacaactcctattcgtagttgaagttgttgataaatactttgattgttacgatggtggctgtattaatgccaaccaagtaatcgttaacaatctggataaatcagctggtttcccatttaataaatggggtaaggctagactttattatgactcaatgagttatgaggatcaagatgcacttttcgcgtatactaagcgtaatgtcatccctactataactcaaatgaatcttaagtatgccattagtgcaaagaatagagctcgcaccgtagctggtgtctctatctgtagtactatgacaaatagacagtttcatcagaaattattgaagtcaatagccgccactagaggagctactgtggtaattggaacaagcaagttttacggtggctggcataatatgttaaaaactgtttacagtgatgtagaaactccacaccttatgggttgggattatccaaaatgtgacagagccatgcctaacatgcttaggataatggcctctcttgttcttgctcgcaaacataacacttgctgtaacttatcacaccgtttctacaggttagctaacgagtgtgcgcaagtattaagtgagatggtcatgtgtggcggctcactatatgttaaaccaggtggaacatcatccggtgatgctacaactgcttatgctaatagtgtctttaacatttgtcaagctgttacagccaatgtaaatgcacttctttcaactgatggtaataagatagctgacaagtatgtccgcaatctacaacacaggctctatgagtgtctctatagaaatagggatgttgatcatgaattcgtggatgagttttacgcttacctgcgtaaacatttctccatgatgattctttctgatgatgccgttgtgtgctataacagtaactatgcggctcaaggtttagtagctagcattaagaactttaaggcagttctttattatcaaaataatgtgttcatgtctgaggcaaaatgttggactgagactgaccttactaaaggacctcacgaattttgctcacagcatacaatgctagttaaacaaggagatgattacgtgtacctgccttacccagatccatcaagaatattaggcgcaggctgttttgtcgatgatattgtcaaaacagatggtacacttatgattgaaaggttcgtgtcactggctattgatgcttacccacttacaaaacatcctaatcaggagtatgctgatgtctttcacttgtatttacaatacattagaaagttacatgatgagcttactggccacatgttggacatgtattccgtaatgctaactaatgataacacctcacggtactgggaacctgagttttatgaggctatgtacacaccacatacagtcttgcaggctgtaggtgcttgtgtattgtgcaattcacagacttcacttcgttgcggtgcctgtattaggagaccattcctatgttgcaagtgctgctatgaccatgtcatttcaacatcacacaaattagtgttgtctgttaatccctatgtttgcaatgccccaggttgtgatgtcactgatgtgacacaactgtatctaggaggtatgagctattattgcaagtcacataagcctcccattagttttccattatgtgctaatggtcaggtttttggtttatacaaaaacacatgtgtaggcagtgacaatgtcactgacttcaatgcgatagcaacatgtgattggactaatgctggcgattacatacttgccaacacttgtactgagagactcaagcttttcgcagcagaaacgctcaaagccactgaggaaacatttaagctgtcatatggtattgccactgtacgcgaagtactctctgacagagaattgcatctttcatgggaggttggaaaacctagaccaccattgaacagaaactatgtctttactggttaccgtgtaactaaaaatagtaaagtacagattggagagtacacctttgaaaaaggtgactatggtgatgctgttgtgtacagaggtactacgacatacaagttgaatgttggtgattactttgtgttgacatctcacactgtaatgccacttagtgcacctactctagtgccacaagagcactatgtgagaattactggcttgtacccaacactcaacatctcagatgagttttctagcaatgttgcaaattatcaaaaggtcggcatgcaaaagtactctacactccaaggaccacctggtactggtaagagtcattttgccatcggacttgctctctattacccatctgctcgcatagtgtatacggcatgctctcatgcagctgttgatgccctatgtgaaaaggcattaaaatatttgcccatagataaatgtagtagaatcatacctgcgcgtgcgcgcgtagagtgttttgataaattcaaagtgaattcaacactagaacagtatgttttctgcactgtaaatgcattgccagaaacaactgctgacattgtagtctttgatgaaatctctatggctactaattatgacttgagtgttgtcaatgctagacttcgtgcaaaacactacgtctatattggcgatcctgctcaattaccagccccccgcacattgctgactaaaggcacactagaaccagaatattttaattcagtgtgcagacttatgaaaacaataggtccagacatgttccttggaacttgtcgccgttgtcctgctgaaattgttgacactgtgagtgctttagtttatgacaataagctaaaagcacacaaggataagtcagctcaatgcttcaaaatgttctacaaaggtgttattacacatgatgtttcatctgcaatcaacagacctcaaataggcgttgtaagagaatttcttacacgcaatcctgcttggagaaaagctgtttttatctcaccttataattcacagaacgctgtagcttcaaaaatcttaggattgcctacgcagactgttgattcatcacagggttctgaatatgactatgtcatattcacacaaactactgaaacagcacactcttgtaatgtcaaccgcttcaatgtggctatcacaagggcaaaaattggcattttgtgcataatgtctgatagagatctttatgacaaactgcaatttacaagtctagaaataccacgtcgcaatgtggctacattacaagcagaaaatgtaactggactttttaaggactgtagtaagatcattactggtcttcatcctacacaggcacctacacacctcagcgttgatataaagttcaagactgaaggattatgtgttgacataccaggcataccaaaggacatgacctaccgtagactcatctctatgatgggtttcaaaatgaattaccaagtcaatggttaccctaatatgtttatcacccgcgaagaagctattcgtcacgttcgtgcgtggattggctttgatgtagagggctgtcatgcaactagagatgctgtgggtactaacctacctctccagctaggattttctacaggtgttaacttagtagctgtaccgactggttatgttgacactgaaaataacacagaattcaccagagttaatgcaaaacctccaccaggtgaccagtttaaacatcttataccactcatgtataaaggcttgccctggaatgtagtgcgtattaagatagtacaaatgctcagtgatacactgaaaggattgtcagacagagtcgtgttcgtcctttgggcgcatggctttgagcttacatcaatgaagtactttgtcaagattggacctgaaagaacgtgttgtctgtgtgacaaacgtgcaacttgcttttctacttcatcagatacttatgcctgctggaatcattctgtgggttttgactatgtctataacccatttatgattgatgttcagcagtggggctttacgggtaaccttcagagtaaccatgaccaacattgccaggtacatggaaatgcacatgtggctagttgtgatgctatcatgactagatgtttagcagtccatgagtgctttgttaagcgcgttgattggtctgttgaataccctattataggagatgaactgagggttaattctgcttgcagaaaagtacaacacatggttgtgaagtctgcattgcttgctgataagtttccagttcttcatgacattggaaatccaaaggctatcaagtgtgtgcctcaggctgaagtagaatggaagttctacgatgctcagccatgtagtgacaaagcttacaaaatagaggaactcttctattcttatgctacacatcacgataaattcactgatggtgtttgtttgttttggaattgtaacgttgatcgttacccagccaatgcaattgtgtgtaggtttgacacaagagtcttgtcaaacttgaacttaccaggctgtgatggtggtagtttgtatgtgaataagcatgcattccacactccagctttcgataaaagtgcatttactaatttaaagcaattgcctttcttttactattctgatagtccttgtgagtctcatggcaaacaagtagtgtcggatattgattatgttccactcaaatctgctacgtgtattacacgatgcaatttaggtggtgctgtttgcagacaccatgcaaatgagtaccgacagtacttggatgcatataatatgatgatttctgctggatttagcctatggatttacaaacaatttgatacttataacctgtggaatacatttaccaggttacagagtttagaaaatgtggcttataatgttgttaataaaggacactttgatggacacgccggcgaagcacctgtttccatcattaataatgctgtttacacaaaggtagatggtattgatgtggagatctttgaaaataagacaacacttcctgttaatgttgcatttgagctttgggctaagcgtaacattaaaccagtgccagagattaagatactcaataatttgggtgttgatatcgctgctaatactgtaatctgggactacaaaagagaagccccagcacatgtatctacaataggtgtctgcacaatgactgacattgccaagaaacctactgagagtgcttgttcttcacttactgtcttgtttgatggtagagtggaaggacaggtagacctttttagaaacgcccgtaatggtgttttaataacagaaggttcagtcaaaggtctaacaccttcaaagggaccagcacaagctagcgtcaatggagtcacattaattggagaatcagtaaaaacacagtttaactactttaagaaagtagacggcattattcaacagttgcctgaaacctactttactcagagcagagacttagaggattttaagcccagatcacaaatggaaactgactttctcgagctcgctatggatgaattcatacagcgatataagctcgagggctatgccttcgaacacatcgtttatggagatttcagtcatggacaacttggcggtcttcatttaatgataggcttagccaagcgctcacaagattcaccacttaaattagaggattttatccctatggacagcacagtgaaaaattacttcataacagatgcgcaaacaggttcatcaaaatgtgtgtgttctgtgattgatcttttacttgatgactttgtcgagataataaagtcacaagatttgtcagtgatttcaaaagtggtcaaggttacaattgactatgctgaaatttcattcatgctttggtgtaaggatggacatgttgaaaccttctacccaaaactacaagcaagtcaagcgtggcaaccaggtgttgcgatgcctaacttgtacaagatgcaaagaatgcttcttgaaaagtgtgaccttcagaattatggtgaaaatgctgttataccaaaaggaataatgatgaatgtcgcaaagtatactcaactgtgtcaatacttaaatacacttactttagctgtaccctacaacatgagagttattcactttggtgctggctctgataaaggagttgcaccaggtacagctgtgctcagacaatggttgccaactggcacactacttgtcgattcagatcttaatgacttcgtctccgacgcagattctactttaattggagactgtgcaacagtacatacggctaataaatgggaccttattattagcgatatgtatgaccctaggaccaaacatgtgacaaaagagaatgactctaaagaagggtttttcacttatctgtgtggatttataaagcaaaaactagccctgggtggttctatagctgtaaagataacagagcattcttggaatgctgacctttacaagcttatgggccatttctcatggtggacagcttttgttacaaatgtaaatgcatcatcatcggaagcatttttaattggggctaactatcttggcaagccgaaggaacaaattgatggctataccatgcatgctaactacattttctggaggaacacaaatcctatccagttgtcttcctattcactctttgacatgagcaaatttcctcttaaattaagaggaactgctgtaatgtctcttaaggagaatcaaatcaatgatatgatttattctcttctggaaaaaggtaggcttatcattagagaaaacaacagagttgtggtttcaagtgatattcttgttaacaactaaacgaacatgtttattttcttattatttcttactctcactagtggtagtgaccttgaccggtgcaccacttttgatgatgttcaagctcctaattacactcaacatacttcatctatgaggggggtttactatcctgatgaaatttttagatcagacactctttatttaactcaggatttatttcttccattttattctaatgttacagggtttcatactattaatcatacgtttggcaaccctgtcataccttttaaggatggtatttattttgctgccacagagaaatcaaatgttgtccgtggttgggtttttggttctaccatgaacaacaagtcacagtcggtgattattattaacaattctactaatgttgttatacgagcatgtaactttgaattgtgtgacaaccctttctttgctgtttctaaacccatgggtacacagacacatactatgatattcgataatgcatttaattgcactttcgagtacatatctgatgccttttcgcttgatgtttcagaaaagtcaggtaattttaaacacttacgagagtttgtgtttaaaaataaagatgggtttctctatgtttataagggctatcaacctatagatgtagttcgtgatctaccttctggttttaacactttgaaacctatttttaagttgcctcttggtattaacattacaaattttagagccattcttacagccttttcacctgctcaagacatttggggcacgtcagctgcagcctattttgttggctatttaaagccaactacatttatgctcaagtatgatgaaaatggtacaatcacagatgctgttgattgttctcaaaatccacttgctgaactcaaatgctctgttaagagctttgagattgacaaaggaatttaccagacctctaatttcagggttgttccctcaggagatgttgtgagattccctaatattacaaacttgtgtccttttggagaggtttttaatgctactaaattcccttctgtctatgcatgggagagaaaaaaaatttctaattgtgttgctgattactctgtgctctacaactcaacatttttttcaacctttaagtgctatggcgtttctgccactaagttgaatgatctttgcttctccaatgtctatgcagattcttttgtagtcaagggagatgatgtaagacaaatagcgccaggacaaactggtgttattgctgattataattataaattgccagatgatttcatgggttgtgtccttgcttggaatactaggaacattgatgctacttcaactggtaattataattataaatataggtatcttagacatggcaagcttaggccctttgagagagacatatctaatgtgcctttctcccctgatggcaaaccttgcaccccacctgctcttaattgttattggccattaaatgattatggtttttacaccactactggcattggctaccaaccttacagagttgtagtactttcttttgaacttttaaatgcaccggccacggtttgtggaccaaaattatccactgaccttattaagaaccagtgtgtcaattttaattttaatggactcactggtactggtgtgttaactccttcttcaaagagatttcaaccatttcaacaatttggccgtgatgtttctgatttcactgattccgttcgagatcctaaaacatctgaaatattagacatttcaccttgctcttttgggggtgtaagtgtaattacacctggaacaaatgcttcatctgaagttgctgttctatatcaagatgttaactgcactgatgtttctacagcaattcatgcagatcaactcacaccagcttggcgcatatattctactggaaacaatgtattccagactcaagcaggctgtcttataggagctgagcatgtcgacacttcttatgagtgcgacattcctattggagctggcatttgtgctagttaccatacagtttctttattacgtagtactagccaaaaatctattgtggcttatactatgtctttaggtgctgatagttcaattgcttactctaataacaccattgctatacctactaacttttcaattagcattactacagaagtaatgcctgtttctatggctaaaacctccgtagattgtaatatgtacatctgcggagattctactgaatgtgctaatttgcttctccaatatggtagcttttgcacacaactaaatcgtgcactctcaggtattgctgctgaacaggatcgcaacacacgtgaagtgttcgctcaagtcaaacaaatgtacaaaaccccaactttgaaatattttggtggttttaatttttcacaaatattacctgaccctctaaagccaactaagaggtcttttattgaggacttgctctttaataaggtgacactcgctgatgctggcttcatgaagcaatatggcgaatgcctaggtgatattaatgctagagatctcatttgtgcgcagaagttcaatggacttacagtgttgccacctctgctcactgatgatatgattgctgcctacactgctgctctagttagtggtactgccactgctggatggacatttggtgctggcgctgctcttcaaataccttttgctatgcaaatggcatataggttcaatggcattggagttacccaaaatgttctctatgagaaccaaaaacaaatcgccaaccaatttaacaaggcgattagtcaaattcaagaatcacttacaacaacatcaactgcattgggcaagctgcaagacgttgttaaccagaatgctcaagcattaaacacacttgttaaacaacttagctctaattttggtgcaatttcaagtgtgctaaatgatatcctttcgcgacttgataaagtcgaggcggaggtacaaattgacaggttaattacaggcagacttcaaagccttcaaacctatgtaacacaacaactaatcagggctgctgaaatcagggcttctgctaatcttgctgctactaaaatgtctgagtgtgttcttggacaatcaaaaagagttgacttttgtggaaagggctaccaccttatgtccttcccacaagcagccccgcatggtgttgtcttcctacatgtcacgtatgtgccatcccaggagaggaacttcaccacagcgccagcaatttgtcatgaaggcaaagcatacttccctcgtgaaggtgtttttgtgtttaatggcacttcttggtttattacacagaggaacttcttttctccacaaataattactacagacaatacatttgtctcaggaaattgtgatgtcgttattggcatcattaacaacacagtttatgatcctctgcaacctgagcttgactcattcaaagaagagctggacaagtacttcaaaaatcatacatcaccagatgttgatcttggcgacatttcaggcattaacgcttctgtcgtcaacattcaaaaagaaattgaccgcctcaatgaggtcgctaaaaatttaaatgaatcactcattgaccttcaagaattgggaaaatatgagcaatatattaaatggccttggtatgtttggctcggcttcattgctggactaattgccatcgtcatggttacaatcttgctttgttgcatgactagttgttgcagttgcctcaagggtgcatgctcttgtggttcttgctgcaagtttgatgaggatgactctgagccagttctcaagggtgtcaaattacattacacataaacgaacttatggatttgtttatgagattttttactcttggatcaattactgcacagccagtaaaaattgacaatgcttctcctgcaagtactgttcatgctacagcaacgataccgctacaagcctcactccctttcggatggcttgttattggcgttgcatttcttgctgtttttcagagcgctaccaaaataattgcgctcaataaaagatggcagctagccctttataagggcttccagttcatttgcaatttactgctgctatttgttaccatctattcacatcttttgcttgtcgctgcaggtatggaggcgcaatttttgtacctctatgccttgatatattttctacaatgcatcaacgcatgtagaattattatgagatgttggctttgttggaagtgcaaatccaagaacccattactttatgatgccaactactttgtttgctggcacacacataactatgactactgtataccatataacagtgtcacagatacaattgtcgttactgaaggtgacggcatttcaacaccaaaactcaaagaagactaccaaattggtggttattctgaggataggcactcaggtgttaaagactatgtcgttgtacatggctatttcaccgaagtttactaccagcttgagtctacacaaattactacagacactggtattgaaaatgctacattcttcatctttaacaagcttgttaaagacccaccgaatgtgcaaatacacacaatcgacggctcttcaggagttgctaatccagcaatggatccaatttatgatgagccgacgacgactactagcgtgcctttgtaagcacaagaaagtgagtacgaacttatgtactcattcgtttcggaagaaacaggtacgttaatagttaatagcgtacttctttttcttgctttcgtggtattcttgctagtcacactagccatccttactgcgcttcgattgtgtgcgtactgctgcaatattgttaacgtgagtttagtaaaaccaacggtttacgtctactcgcgtgttaaaaatctgaactcttctgaaggagttcctgatcttctggtctaaacgaactaactattattattattctgtttggaactttaacattgcttatcatggcagacaacggtactattaccgttgaggagcttaaacaactcctggaacaatggaacctagtaataggtttcctatgcctagcctggattatgttactacaatttgcctattctaatcggaacaggtttttgtacataataaagcttgttttcctctggctcttgtggccagtaacacttgcttgttttgtgcttgctgctgtctacagaattaattgggtgactggcgggattgcgattgcaatggcttgtattgtaggcttgatgtggcttagctacttcgttgcttccttcaggctgtttgctcgtacccgctcaatgtggtcattcaacccagaaacaaacattcttctcaatgtgcctctccgggggacaattgtgaccagaccgctcatggaaagtgaacttgtcattggtgctgtgatcattcgtggtcacttgcgaatggccggacactccctagggcgctgtgacattaaggacctgccaaaagagatcactgtggctacatcacgaacgctttcttattacaaattaggagcgtcgcagcgtgtaggcactgattcaggttttgctgcatacaaccgctaccgtattggaaactataaattaaatacagaccacgccggtagcaacgacaatattgctttgctagtacagtaagtgacaacagatgtttcatcttgttgacttccaggttacaatagcagagatattgattatcattatgaggactttcaggattgctatttggaatcttgacgttataataagttcaatagtgagacaattatttaagcctctaactaagaagaattattcggagttagatgatgaagaacctatggagttagattatccataaaacgaacatgaaaattattctcttcctgacattgattgtatttacatcttgcgagctatatcactatcaggagtgtgttagaggtacgactgtactactaaaagaaccttgcccatcaggaacatacgagggcaattcaccatttcaccctcttgctgacaataaatttgcactaacttgcactagcacacactttgcttttgcttgtgctgacggtactcgacatacctatcagctgcgtgcaagatcagtttcaccaaaacttttcatcagacaagaggaggttcaacaagagctctactcgccactttttctcattgttgctgctctagtatttttaatactttgcttcaccattaagagaaagacagaatgaatgagctcactttaattgacttctatttgtgctttttagcctttctgctattccttgttttaataatgcttattatattttggttttcactcgaaatccaggatctagaagaaccttgtaccaaagtctaaacgaacatgaaacttctcattgttttgacttgtatttctctatgcagttgcatatgcactgtagtacagcgctgtgcatctaataaacctcatgtgcttgaagatccttgtaaggtacaacactaggggtaatacttatagcactgcttggctttgtgctctaggaaaggttttaccttttcatagatggcacactatggttcaaacatgcacacctaatgttactatcaactgtcaagatccagctggtggtgcgcttatagctaggtgttggtaccttcatgaaggtcaccaaactgctgcatttagagacgtacttgttgttttaaataaacgaacaaattaaaatgtctgataatggaccccaatcaaaccaacgtagtgccccccgcattacatttggtggacccacagattcaactgacaataaccagaatggaggacgcaatggggcaaggccaaaacagcgccgaccccaaggtttacccaataatactgcgtcttggttcacagctctcactcagcatggcaaggaggaacttagattccctcgaggccagggcgttccaatcaacaccaatagtggtccagatgaccaaattggctactaccgaagagctacccgacgagttcgtggtggtgacggcaaaatgaaagagctcagccccagatggtacttctattacctaggaactggcccagaagcttcacttccctacggcgctaacaaagaaggcatcgtatgggttgcaactgagggagccttgaatacacccaaagaccacattggcacccgcaatcctaataacaatgctgccaccgtgctacaacttcctcaaggaacaacattgccaaaaggcttctacgcagagggaagcagaggcggcagtcaagcctcttctcgctcctcatcacgtagtcgcggtaattcaagaaattcaactcctggcagcagtaggggaaattctcctgctcgaatggctagcggaggtggtgaaactgccctcgcgctattgctgctagacagattgaaccagcttgagagcaaagtttctggtaaaggccaacaacaacaaggccaaactgtcactaagaaatctgctgctgaggcatctaaaaagcctcgccaaaaacgtactgccacaaaacagtacaacgtcactcaagcatttgggagacgtggtccagaacaaacccaaggaaatttcggggaccaagacctaatcagacaaggaactgattacaaacattggccgcaaattgcacaatttgctccaagtgcctctgcattctttggaatgtcacgcattggcatggaagtcacaccttcgggaacatggctgacttatcatggagccattaaattggatgacaaagatccacaattcaaagacaacgtcatactgctgaacaagcacattgacgcatacaaaacattcccaccaacagagcctaaaaaggacaaaaagaaaaagactgatgaagctcagcctttgccgcagagacaaaagaagcagcccactgtgactcttcttcctgcggctgacatggatgatttctccagacaacttcaaaattccatgagtggagcttctgctgattcaactcaggcataaacactcatgatgaccacacaaggcagatgggctatgtaaacgttttcgcaattccgtttacgatacatagtctactcttgtgcagaatgaattctcgtaactaaacagcacaagtaggtttagttaactttaatctcacatagcaatctttaatcaatgtgtaacattagggaggacttgaaagagccaccacattttcatcgaggccacgcggagtacgatcgagggtacagtgaataatgctagggagagctgcctatatggaagagccctaatgtgtaaaattaattttagtagtgctatccccatgtgattttaatagcttcttaggagaatgac

SEQ ID NO: 80 - DNA, 29727 bp, Coronavirus; identical to SEQ ID NO: 78

SEQ ID NO: 81 - DNA, 29725 bp, Coronavirus
atattaggtttttacctacccaggaaaagccaaccaacctcgatctcttgtagatctgttctctaaacgaactttaaaatctgtgtagctgtcgctcggctgcatgcctagtgcacctacgcagtataaacaataataaattttactgtcgttgacaagaaacgagtaactcgtccctcttctgcagactgcttacggtttcgtccgtgttgcagtcgatcatcagcatacctaggtttcgtccgggtgtgaccgaaaggtaagatggagagccttgttcttggtgtcaacgagaaaacacacgtccaactcagtttgcctgtccttcaggttagagacgtgctagtgcgtggcttcggggactctgtggaagaggccctatcggaggcacgtgaacacctcaaaaatggcacttgtggtctagtagagctggaaaaaggcgtactgccccagcttgaacagccctatgtgttcattaaacgttctgatgccttaagcaccaatcacggccacaaggtcgttgagctggttgcagaaatggacggcattcagtacggtcgtagcggtataacactgggagtactcgtgccacatgtgggcgaaaccccaattgcataccgcaatgttcttcttcgtaagaacggtaataagggagccggtggtcatagctatggcatcgatctaaagtcttatgacttaggtgacgagcttggcactgatcccattgaagattatgaacaaaactggaacactaagcatggcagtggtgcactccgtgaactcactcgtgagctcaatggaggtgcagtcactcgctatgtcgacaacaatttctgtggcccagatgggtaccctcttgattgcatcaaagattttctcgcacgcgcgggcaagtcaatgtgcactctttccgaacaacttgattacatcgagtcgaagagaggtgtctactgctgccgtgaccatgagcatgaaattgcctggttcactgagcgctctgataagagctacgagcaccagacacccttcgaaattaagagtgccaagaaatttgacactttcaaaggggaatgcccaaagtttgtgtttcctcttaactcaaaagtcaaagtcattcaaccacgtgttgaaaagaaaaagactgagggtttcatggggcgtatacgctctgtgtaccctgttgcatctccacaggagtgtaacaatatgcacttgtctaccttgatgaaatgtaatcattgcgatgaagtttcatggcagacgtgcgactttctgaaagccacttgtgaacattgtggcactgaaaatttagttattgaaggacctactacatgtgggtacctacctactaatgctgtagtgaaaatgccatgtcctgcctgtcaagacccagagattggacctgagcatagtgttgcagattatcacaaccactcaaacattgaaactcgactccgcaagggaggtaggactagatgttttggaggctgtgtgtttgcctatgttggctgctataataagcgtgcctactgggttcctcgtgctagtgctgatattggctcaggccatactggcattactggtgacaatgtggagaccttgaatgaggatctccttgagatactgagtcgtgaacgtgttaacattaacattgttggcgattttcatttgaatgaagaggttgccatcattttggcatctttctctgcttctacaagtgcctttattgacactataaagagtcttgattacaagtctttcaaaaccattgttgagtcctgcggtaactataaagttaccaagggaaagcccgtaaaaggtgcttggaacattggacaacagagatcagttttaacaccactgtgtggttttccctcacaggctgctggtgttatcagatcaatttttgcgcgcacacttgatgcagcaaaccactcaattcctgatttgcaaagagcagctgtcaccatacttgatggtatttctgaacagtcattacgtcttgtcgacgccatggtttatacttcagacctgctcaccaacagtgtcattattatggcatatgtaactggtggtcttgtacaacagacttctcagtggttgtctaatcttttgggcactactgttgaaaaactcaggcctatctttgaatggattgaggcgaaacttagtgcaggagttgaatttctcaaggatgcttgggagattctcaaatttctcattacaggtgtttttgacatcgtcaagggtcaaatacaggttgcttcagataacatcaaggattgtgtaaaatgcttcattgatgttgttaacaaggcactcgaaatgtgcattgatcaagtcactatcgctggcgcaaagttgcgatcactcaacttaggtgaagtcttcatcgctcaaagcaagggactttaccgtcagtgtatacgtggcaaggagcagctgcaactactcatgcctcttaaggcaccaaaagaagtaacctttcttgaaggtgattcacatgacacagtacttacctctgaggaggttgttctcaagaacggtgaactcgaagcactcgagacgcccgttgatagcttcacaaatggagctatcgttggcacaccagtctgtgtaaatggcctcatgctcttagagattaaggacaaagaacaatactgcgcattgtctcctggtttactggctacaaacaatgtctttcgcttaaaagggggtgcaccaattaaaggtgtaacctttggagaagatactgtttgggaagttcaaggttacaagaatgtgagaatcacatttgagcttgatgaacgtgttgacaaagtgcttaatgaaaagtgctctgtctacactgttgaatccggtaccgaagttactgagtttgcatgtgttgtagcagaggctgttgtgaagactttacaaccagtttctgatctccttaccaacatgggtattgatcttgatgagtggagtgtagctacattctacttatttgatgatgctggtgaagaaaacttttcatcacgtatgtattgttccttttaccctccagatgaggaagaagaggacgatgcagagtgtgaggaagaagaaattgatgaaacctgtgaacatgagtacggtacagaggatgattatcaaggtctccctctggaatttggtgcctcagctgaaacagttcgagttgaggaagaagaagaggaagactggctggatgatactactgagcaatcagagattgagccagaaccagaacctacacctgaagaaccagttaatcagtttactggttatttaaaacttactgacaatgttgccattaaatgtgttgacatcgttaaggaggcacaaagtgctaatcctatggtgattgtaaatgctgctaacatacacctgaaacatggtggtggtgtagcaggtgcactcaacaaggcaaccaatggtgccatgcaaaaggagagtgatgattacattaagctaaatggccctcttacagtaggagggtcttgtttgctttctggacataatcttgctaagaagtgtctgcatgttgttggacctaacctaaatgcaggtgaggacatccagcttcttaaggcagcatatgaaaatttcaattcacaggacatcttacttgcaccattgttgtcagcaggcatatttggtgctaaaccacttcagtctttacaagtgtgcgtgcagacggttcgtacacaggtttatattgcagtcaatgacaaagctctttatgagcaggttgtcatggattatcttgataacctgaagcctagagtggaagcacctaaacaagaggagccaccaaacacagaagattccaaaactgaggagaaatccgtcgtacagaagcctgtcgatgtgaagccaaaaattaaggcctgcattgatgaggttaccacaacactggaagaaactaagtttcttaccaataagttactcttgtttgctgatatcaatggtaagctttaccatgattctcagaacatgcttagaggtgaagatatgtctttccttgagaaggatgcaccttacatggtaggtgatgttatcactagtggtgatatcacttgtgttgtaataccctccaaaaaggctggtggcactactgagatgctctcaagagctttgaagaaagtgccagttgatgagtatataaccacgtaccctggacaaggatgtgctggttatacacttgaggaagctaagactgctcttaagaaatgcaaatctgcattttatgtactaccttcagaagcacctaatgctaaggaagagattctaggaactgtatcctggaatttgagagaaatgcttgctcatgctgaagagacaagaaaattaatgcctatatgcatggatgttagagccataatggcaaccatccaacgtaagtataaaggaattaaaattcaagagggcatcgttgactatggtgtccgattcttcttttatactagtaaagagcctgtagcttctattattacgaagctgaactctctaaatgagccgcttgtcacaatgccaattggttatgtgacacatggttttaatcttgaagaggctgcgcgctgtatgcgttctcttaaagctcctgccgtagtgtcagtatcatcaccagatgctgttactacatataatggatacctcacttcgtcatcaaagacatctgaggagcactttgtagaaacagtttctttggctggctcttacagagattggtcctattcaggacagcgtacagagttaggtgttgaatttcttaagcgtggtgacaaaattgtgtaccacactctggagagccccgtcgagtttcatcttgacggtgaggttctttcacttgacaaactaaagagtctcttatccctgcgggaggttaagactataaaagtgttcacaactgtggacaacactaatctccacacacagcttgtggatatgtctatgacatatggacagcagtttggtccaacatacttggatggtgctgatgttacaaaaattaaacctcatgtaaatcatgagggtaagactttctttgtactacctagtgatgacacactacgtagtgaagctttcgagtactaccatactcttgatgagagttttcttggtaggtacatgtctgctttaaaccacacaaagaaatggaaatttcctcaagttggtggtttaacttcaattaaatgggctgataacaattgttatttgtctagtgttttattagcacttcaacagcttgaagtcaaattcaatgcaccagcacttcaagaggcttattatagagcccgtgctggtgatgctgctaacttttgtgcactcatactcgcttacagtaataaaactgttggcgagcttggtgatgtcagagaaactatgacccatcttctacagcatgctaatttggaatctgcaaagcgagttcttaatgtggtgtgtaaacattgtggtcagaaaactactaccttaacgggtgtagaagctgtgatgtatatgggtactctatcttatgataatcttaagacaggtgtttccattccatgtgtgtgtggtcgtgatgctacacaatatctagtacaacaagagtcttcttttgttatgatgtctgcaccacctgctgagtataaattacagcaaggtacattcttatgtgcgaatgagtacactggtaactatcagtgtggtcattacactcatataactgctaaggagaccctctatcgtattgacggagctcaccttacaaagatgtcagagtacaaaggaccagtgactgatgttttctacaaggaaacatcttacactacaaccatcaagcctgtgtcgtataaactcgatggagttacttacacagagattgaaccaaaattggatgggtattataaaaaggataatgcttactatacagagcagcctatagaccttgtaccaactcaaccattaccaaatgcgagttttgataatttcaaactcacatgttctaacacaaaatttgctgatgatttaaatcaaatgacaggcttcacaaagccagcttcacgagagctatctgtcacattcttcccagacttgaatggcgatgtagtggctattgactatagacactattcagcgagtttcaagaaaggtgctaaattactgcataagccaattgtttggcacattaaccaggctacaaccaagacaacgttcaaaccaaacacttggtgtttacgttgtctttggagtacaaagccagtagatacttcaaattcatttgaagttctggcagtagaagacacacaaggaatggacaatcttgcttgtgaaagtcaacaacccacctctgaagaagtagtggaaaatcctaccatacagaaggaagtcatagagtgtgacgtgaaaactaccgaagttgtaggcaatgtcatacttaaaccatcagatgaaggtgttaaagtaacacaagagttaggtcatgaggatcttatggctgcttatgtggaaaacacaagcattaccattaagaaacctaatgagctttcactagccttaggtttaaaaacaattgccactcatggtattgctgcaattaatagtgttccttggagtaaaattttggcttatgtcaaaccattcttaggacaagcagcaattacaacatcaaattgcgctaagagattagcacaacgtgtgtttaacaattatatgccttatgtgtttacattattgttccaattgtgtacttttactaaaagtaccaattctagaattagagcttcactacctacaactattgctaaaaatagtgttaagagtgttgctaaattatgtttggatgccggcattaattatgtgaagtcacccaaattttctaaattgttcacaatcgctatgtggctattgttgttaagtatttgcttaggttctctaatctgtgtaactgctgcttttggtgtactcttatctaattttggtgctccttcttattgtaatggcgttagagaattgtatcttaattcgtctaacgttactactatggatttctgtgaaggttcttttccttgcagcatttgtttaagtggattagactcccttgattcttatccagctcttgaaaccattcaggtgacgatttcatcgtacaagctagacttgacaattttaggtctggccgctgagtgggttttggcatatatgttgttcacaaaattcttttatttattaggtctttcagctataatgcaggtgttctttggctattttgctagtcatttcatcagcaattcttggctcatgtggtttatcattagtattgtacaaatggcacccgtttctgcaatggttaggatgtacatcttctttgcttctttctactacatatggaagagctatgttcatatcatggatggttgcacctcttcgacttgcatgatgtgctataagcgcaatcgtgccacacgcgttgagtgtacaactattgttaatggcatgaagagatctttctatgtctatgcaaatggaggccgtggcttctgcaagactcacaattggaattgtctcaattgtgacacattttgcactggtagtacattcattagtgatgaagttgctcgtgatttgtcactccagtttaaaagaccaatcaaccctactgaccagtcatcgtatattgttgatagtgttgctgtgaaaaatggcgcgcttcacctctactttgacaaggctggtcaaaagacctatgagagacatccgctctcccattttgtcaatttagacaatttgagagctaacaacactaaaggttcactgcctattaatgtcatagtttttgatggcaagtccaaatgcgacgagtctgcttctaagtctgcttctgtgtactacagtcagctgatgtgccaacctattctgttgcttgaccaagctcttgtatcagacgttggagatagtactgaagtttccgttaagatgtttgatgcttatgtcgacaccttttcagcaacttttagtgttcctatggaaaaacttaaggcacttgttgctacagctcacagcgagttagcaaagggtgtagctttagatggtgtcctttctacattcgtgtcagctgcccgacaaggtgttgttgataccgatgttgacacaaaggatgttattgaatgtctcaaactttcacatcactctgacttagaagtgacaggtgacagttgtaacaatttcatgctcacctataataaggttgaaaacatgacgcccagagatcttggcgcatgtattgactgtaatgcaaggcatatcaatgcccaagtagcaaaaagtcacaatgtttcactcatctggaatgtaaaagactacatgtctttatctgaacagctgcgtaaacaaattcgtagtgctgccaagaagaacaacataccttttagactaacttgtgctacaactagacaggttgtcaatgtcataactactaaaatctcactcaagggtggtaagattgttagtacttgttttaaacttatgcttaaggccacattattgtgcgttcttgctgcattggtttgttatatcgttatgccagtacatacattgtcaatccatgatggttacacaaatgaaatcattggttacaaagccattcaggatggtgtcactcgtgacatcatttctactgatgattgttttgcaaataaacatgctggttttgacgcatggtttagccagcgtggtggttcatacaaaaatgacaaaagctgccctgtagtagctgctatcattacaagagagattggtttcatagtgcctggcttaccgggtactgtgctgagagcaatcaatggtgacttcttgcattttctacctcgtgtttttagtgctgttggcaacatttgctacacaccttccaaactcattgagtatagtgattttgctacctctgcttgcgttcttgctgctgagtgtacaatttttaaggatgctatgggcaaacctgtgccatattgttatgacactaatttgctagagggttctatttcttatagtgagcttcgtccagacactcgttatgtgcttatggatggttccatcatacagtttcctaacacttacctggagggttctgttagagtagtaacaacttttgatgctgagtactgtagacatggtacatgcgaaaggtcagaagtaggtatttgcctatctaccagtggtagatgggttcttaataatgagcattacagagctctatcaggagttttctgtggtgttgatgcgatgaatctcatagctaacatctttactcctcttgtgcaacctgtgggtgctttagatgtgtctgcttcagtagtggctggtggtattattgccatattggtgacttgtgctgcctactactttatgaaattcagacgtgtttttggtgagtacaaccatgttgttgctgctaatgcacttttgtttttgatgtctttcactatactctgtctggtaccagcttacagctttctgccgggagtctactcagtcttttacttgtacttgacattctatttcaccaatgatgtttcattcttggctcaccttcaatggtttgccatgttttctcctattgtgcctttttggataacagcaatctatgtattctgtatttctctgaagcactgccattggttctttaacaactatcttaggaaaagagtcatgtttaatggagttacatttagtaccttcgaggaggctgctttgtgtacctttttgctcaacaaggaaatgtacctaaaattgcgtagcgagacactgttgccacttacacagtataacaggtatcttgctctatataacaagtacaagtatttcagtggagccttagatactaccagctatcgtgaagcagcttgctgccacttagcaaaggctctaaatgactttagcaactcaggtgctgatgttctctaccaaccaccacagacatcaatcacttctgctgttctgcagagtggttttaggaaaatggcattcccgtcaggcaaagttgaagggtgcatggtacaagtaacctgtggaactacaactcttaatggattgtggttggatgacacagtatactgtccaagacatgtcatttgcacagcagaagacatgcttaatcctaactatgaagatctgctcattcgcaaatccaaccatagctttcttgttcaggctggcaatgttcaacttcgtgttattggccattctatgcaaaattgtctgcttaggcttaaagttgatacttctaaccctaagacacccaagtataaatttgtccgtatccaacctggtcaaacattttcagttctagcatgctacaatggttcaccatctggtgtttatcagtgtgccatgagacctaatcataccattaaaggttctttccttaatggatcatgtggtagtgttggttttaacattgattatgattgcgtgtctttctgctatatgcatcatatggagcttccaacaggagtacacgctggtactgacttagaaggtaaattctatggtccatttgttgacagacaaactgcacaggctgcaggtacagacacaaccataacattaaatgttttggcatggctgtatgctgctgttatcaatggtgataggtggtttcttaatagattcaccactactttgaatgactttaaccttgtggcaatgaagtacaactatgaacctttgacacaagatcatgttgacatattgggacctctttctgctcaaacaggaattgccgtcttagatatgtgtgctgctttgaaagagctgctgcagaatggtatgaatggtcgtactatccttggtagcactattttagaagatgagtttacaccatttgatgttgttagacaatgctctggtgttaccttccaaggtaagttcaagaaaattgttaagggcactcatcattggatgcttttaactttcttgacatcactattgattcttgttcaaagtacacagtggtcactgtttttctttgtttacgagaatgctttcttgccatttactcttggtattatggcaattgctgcatgtgctatgctgcttgttaagcataagcacgcattcttgtgcttgtttctgttaccttctcttgcaacagttgcttactttaatatggtctacatgcctgctagctgggtgatgcgtatcatgacatggcttgaattggctgacactagcttgtctggttataggcttaaggattgtgttatgtatgcttcagctttagttttgcttattctcatgacagctcgcactgtttatgatgatgctgctagacgtgtttggacactgatgaatgtcattacacttgtttacaaagtctactatggtaatgctttagatcaagctatttccatgtgggccttagttatttctgtaacctctaactattctggtgtcgttacgactatcatgtttttagctagagctatagtgtttgtgtgtgttgagtattatccattgttatttattactggcaacaccttacagtgtatcatgcttgtttattgtttcttaggctattgttgctgctgctactttggccttttctgtttactcaaccgttacttcaggcttactcttggtgtttatgactacttggtctctacacaagaatttaggtatatgaactcccaggggcttttgcctcctaagagtagtattgatgctttcaagcttaacattaagttgttgggtattggaggtaaaccatgtatcaaggttgctactgtacagtctaaaatgtctgacgtaaagtgcacatctgtggtactgctctcggttcttcaacaacttagagtagagtcatcttctaaattgtgggcacaatgtgtacaactccacaatgatattcttcttgcaaaagacacaactgaagctttcgagaagatggtttctcttttgtctgttttgctatccatgcagggtgctgtagacattaataggttgtgcgaggaaatgctcgataaccgtgctactcttcaggctattgcttcagaatttagttctttaccatcatatgccgcttatgccactgcccaggaggcctatgagcaggctgtagctaatggtgattctgaagtcgttctcaaaaagttaaagaaatctttgaatgtggctaaatctgagtttgaccgtgatgctgccatgcaacgcaagttggaaaagatggcagatcaggctatgacccaaatgtacaaacaggcaagatctgaggacaagagggcaaaagtaactagtgctatgcaaacaatgctcttcactatgcttaggaagcttgataatgatgcacttaacaacattatcaacaatgcgcgtgatggttgtgttccactcaacatcataccattgactacagcagccaaactcatggttgttgtccctgattatggtacctacaagaacacttgtgatggtaacacctttacatatgcatctgcactctgggaaatccagcaagttgttgatgcggatagcaagattgttcaacttagtgaaattaacatggacaattcaccaaatttggcttggcctcttattgttacagctctaagagccaactcagctgttaaactacagaataatgaactgagtccagtagcactacgacagatgtcctgtgcggctggtaccacacaaacagcttgtactgatgacaatgcacttgcctactataacaattcgaagggaggtaggtttgtgctggcattactatcagaccaccaagatctcaaatgggctagattccctaagagtgatggtacaggtacaatttacacagaactggaaccaccttgtaggtttgttacagacacaccaaaagggcctaaagtgaaatacttgtacttcatcaaaggcttaaacaacctaaatagaggtatggtgctgggcagtttagctgctacagtacgtcttcaggctggaaatgctacagaagtacctgccaattcaactgtgctttccttctgtgcttttgcagtagaccctgctaaagcatataaggattacctagcaagtggaggacaaccaatcaccaactgtgtgaagatgttgtgtacacacactggtacaggacaggcaattactgtaacaccagaagctaacatggaccaagagtcctttggtggtgcttcatgttgtctgtattgtagatgccacattgaccatccaaatcctaaaggattctgtgacttgaaaggtaagtacgtccaaatacctaccacttgtgctaatgacccagtgggttttacacttagaaacacagtctgtaccgtctgcggaatgtggaaaggttatggctgtagttgtgaccaactccgcgaacccttgatgcagtctgcggatgcatcaacgtttttaaacgggtttgcggtgtaagtgcagcccgtcttacaccgtgcggcacaggcactagtactgatgtcgtctacagggcttttgatatttacaacgaaaaagttgctggttttgcaaagttcctaaaaactaattgctgtcgcttccaggagaaggatgaggaaggcaatttattagactcttactttgtagttaagaggcatactatgtctaactaccaacatgaagagactatttataacttggttaaagattgtccagcggttgctgtccatgactttttcaagtttagagtagatggtgacatggtaccacatatatcacgtcagcgtctaactaaatacacaatggctgatttagtctatgctctacgtcattttgatgagggtaattgtgatacattaaaagaaatactcgtcacatacaattgctgtgatgatgattatttcaataagaaggattggtatgacttcgtagagaatcctgacatcttacgcgtatatgctaacttaggtgagcgtgtacgccaatcattattaaagactgtacaattctgcgatgctatgcgtgatgcaggcattgtaggcgtactgacattagataatcaggatcttaatgggaactggtacgatttcggtgatttcgtacaagtagcaccaggctgcggagttcctattgtggattcatattactcattgctgatgcccatcctcactttgactagggcattggctgctgagtcccatatggatgctgatctcgcaaaaccacttattaagtgggatttgctgaaatatgattttacggaagagagactttgtctcttcgaccgttattttaaatattgggaccagacataccatcccaattgtattaactgtttggatgataggtgtatccttcattgtgcaaactttaatgtgttattttctactgtgtttccacctacaagttttggaccactagtaagaaaaatatttgtagatggtgttccttttgttgtttcaactggataccattttcgtgagttaggagtcgtacataatcaggatgtaaacttacatagctcgcgtctcagtttcaaggaacttttagtgtatgctgctgatccagctatgcatgcagcttctggcaatttattgctagataaacgcactacatgcttttcagtagctgcactaacaaacaatgttgcttttcaaactgtcaaacccggtaattttaataaagacttttatgactttgctgtgtctaaaggtttctttaaggaaggaagttctgttgaactaaaacacttcttctttgctcaggatggcaacgctgctatcagtgattatgactattatcgttataatctgccaacaatgtgtgatatcagacaactcctattcgtagttgaagttgttgataaatactttgattgttacgatggtggctgtattaatgccaaccaagtaatcgttaacaatctggataaatcagctggtttcccatttaataaatggggtaaggctagactttattatgactcaatgagttatgaggatcaagatgcacttttcgcgtatactaagcgtaatgtcatccctactataactcaaatgaatcttaagtatgccattagtgcaaagaatagagctcgcaccgtagctggtgtctctatctgtagtactatgacaaatagacagtttcatcagaaattattgaagtcaatagccgccactagaggagctactgtggtaattggaacaagcaagttttacggtggctggcataatatgttaaaaactgtttacagtgatgtagaaactccacaccttatgggttgggattatccaaaatgtgacagagccatgcctaacatgcttaggataatggcctctcttgttcttgctcgcaaacataacacttgctgtaacttatcacaccgtttctacaggttagctaacgagtgtgcgcaagtattaagtgagatggtcatgtgtggcggctcactatatgttaaaccaggtggaacatcatccggtgatgctacaactgcttatgctaatagtgtctttaacatttgtcaagctgttacagccaatgtaaatgcacttctttcaactgatggtaataagatagctgacaagtatgtccgcaatctacaacacaggctctatgagtgtctctatagaaatagggatgttgatcatgaattcgtggatgagttttacgcttacctgcgtaaacatttctccatgatgattctttctgatgatgccgttgtgtgctataacagtaactatgcggctcaaggtttagtagctagcattaagaactttaaggcagttctttattatcaaaataatgtgttcatgtctgaggcaaaatgttggactgagactgaccttactaaaggacctcacgaattttgctcacagcatacaatgctagttaaacaaggagatgattacgtgtacctgccttacccagatccatcaagaatattaggcgcaggctgttttgtcgatgatattgtcaaaacagatggtacacttatgattgaaaggttcgtgtcactggctattgatgcttacccacttacaaaacatcctaatcaggagtatgctgatgtctttcacttgtatttacaatacattagaaagttacatgatgagcttactggccacatgttggacatgtattccgtaatgctaactaatgataacacctcacggtactgggaacctgagttttatgaggctatgtacacaccacatacagtcttgcaggctgtaggtgcttgtgtattgtgcaattcacagacttcacttcgttgcggtgcctgtattaggagaccattcctatgttgcaagtgctgctatgaccatgtcatttcaacatcacacaaattagtgttgtctgttaatccctatgtttgcaatgccccaggttgtgatgtcactgatgtgacacaactgtatctaggaggtatgagctattattgcaagtcacataagcctcccattagttttccattatgtgctaatggtcaggtttttggtttatacaaaaacacatgtgtaggcagtgacaatgtcactgacttcaatgcgatagcaacatgtgattggactaatgctggcgattacatacttgccaacacttgtactgagagactcaagcttttcgcagcagaaacgctcaaagccactgaggaaacatttaagctgtcatatggtattgccactgtacgcgaagtactctctgacagagaattgcatctttcatgggaggttggaaaacctagaccaccattgaacagaaactatgtctttactggttaccgtgtaactaaaaatagtaaagtacagattggagagtacacctttgaaaaaggtgactatggtgatgctgttgtgtacagaggtactacgacatacaagttgaatgttggtgattactttgtgttgacatctcacactgtaatgccacttagtgcacctactctagtgccacaagagcactatgtgagaattactggcttgtacccaacactcaacatctcagatgagttttctagcaatgttgcaaattatcaaaaggtcggcatgcaaaagtactctacactccaaggaccacctggtactggtaagagtcattttgccatcggacttgctctctattacccatctgctcgcatagtgtatacggcatgctctcatgcagctgttgatgccctatgtgaaaaggcattaaaatatttgcccatagataaatgtagtagaatcatacctgcgcgtgcgcgcgtagagtgttttgataaattcaaagtgaattcaacactagaacagtatgttttctgcactgtaaatgcattgccagaaacaactgctgacattgtagtctttgatgaaatctctatggctactaattatgacttgagtgttgtcaatgctagacttcgtgcaaaacactacgtctatattggcgatcctgctcaattaccagccccccgcacattgctgactaaaggcacactagaaccagaatattttaattcagtgtgcagacttatgaaaacaataggtccagacatgttccttggaacttgtcgccgttgtcctgctgaaattgttgacactgtgagtgctttagtttatgacaataagctaaaagcacacaaggataagtcagctcaatgcttcaaaatgttctacaaaggtgttattacacatgatgtttcatctgcaatcaacagacctcaaataggcgttgtaagagaatttcttacacgcaatcctgcttggagaaaagctgtttttatctcaccttataattcacagaacgctgtagcttcaaaaatcttaggattgcctacgcagactgttgattcatcacagggttctgaatatgactatgtcatattcacacaaactactgaaacagcacactcttgtaatgtcaaccgcttcaatgtggctatcacaagggcaaaaattggcattttgtgcataatgtctgatagagatctttatgacaaactgcaatttacaagtctagaaataccacgtcgcaatgtggctacattacaagcagaaaatgtaactggactttttaaggactgtagtaagatcattactggtcttcatcctacacaggcacctacacacctcagcgttgatataaagttcaagactgaaggattatgtgttgacataccaggcataccaaaggacatgacctaccgtagactcatctctatgatgggtttcaaaatgaattaccaagtcaatggttaccctaatatgtttatcacccgcgaagaagctattcgtcacgttcgtgcgtggattggctttgatgtagagggctgtcatgcaactagagatgctgtgggtactaacctacctctccagctaggattttctacaggtgttaacttagtagctgtaccgactggttatgttgacactgaaaataacacagaattcaccagagttaatgcaaaacctccaccaggtgaccagtttaaacatcttataccactcatgtataaaggcttgccctggaatgtagtgcgtattaagatagtacaaatgctcagtgatacactgaaaggattgtcagacagagtcgtgttcgtcctttgggcgcatggctttgagcttacatcaatgaagtactttgtcaagattggacctgaaagaacgtgttgtctgtgtgacaaacgtgcaacttgcttttctacttcatcagatacttatgcctgctggaatcattctgtgggttttgactatgtctataacccatttatgattgatgttcagcagtggggctttacgggtaaccttcagagtaaccatgaccaacattgccaggtacatggaaatgcacatgtggctagttgtgatgctatcatgactagatgtttagcagtccatgagtgctttgttaagcgcgttgattggtctgttgaataccctattataggagatgaactgagggttaattctgcttgcagaaaagtacaacacatggttgtgaagtctgcattgcttgctgataagtttccagttcttcatgacattggaaatccaaaggctatcaagtgtgtgcctcaggctgaagtagaatggaagttctacgatgctcagccatgtagtgacaaagcttacaaaatagaggaactcttctattcttatgctacacatcacgataaattcactgatggtgtttgtttgttttggaattgtaacgttgatcgttacccagccaatgcaattgtgtgtaggtttgacacaagagtcttgtcaaacttgaacttaccaggctgtgatggtggtagtttgtatgtgaataagcatgcattccacactccagctttcgataaaagtgcatttactaatttaaagcaattgcctttcttttactattctgatagtccttgtgagtctcatggcaaacaagtagtgtcggatattgactatgttccactcaaatctgctacgtgtattacacgatgcaatttaggtggtgctgtttgcagacaccatgcaaatgagtaccgacagtacttggatgcatataatatgatgatttctgctggatttagcctatggatttacaaacaatttgatacttataacctgtggaatacatttaccaggttacagagtttagaaaatgtggcttataatgttgttaataaaggacactttgatggacacgccggcgaagcacctgtttccatcattaataatgctgtttacacaaaggtagatggtattgatgtggagatctttgaaaataagacaacacttcctgttaatgttgcatttgagctttgggctaagcgtaacattaaaccagtgccagagattaagatactcaataatttgggtgttgatatcgctgctaatactgtaatctgggactacaaaagagaagccccagcacatgtatctacaataggtgtctgcacaatgactgacattgccaagaaacctactgagagtgcttgttcttcacttactgtcttgtttgatggtagagtggaaggacaggtagacctttttagaaacgcccgtaatggtgttttaataacagaaggttcagtcaaaggtctaacaccttcaaagggaccagcacaagctagcgtcaatggagtcacattaattggagaatcagtaaaaacacagtttaactactttaagaaagtagacggcattattcaacagttgcctgaaacctactttactcagagcagagacttagaggattttaagcccagatcacaaatggaaactgactttctcgagctcgctatggatgaattcatacagcgatataagctcgagggctatgccttcgaacacatcgtttatggagatttcagtcatggacaacttggcggtcttcatttaatgataggcttagccaagcgctcacaagattcaccacttaaattagaggattttatccctatggacagcacagtgaaaaattacttcataacagatgcgcaaacaggttcatcaaaatgtgtgtgttctgtgattgatcttttacttgatgactttgtcgagataataaagtcacaagatttgtcagtgatttcaaaagtggtcaaggttacaattgactatgctgaaatttcattcatgctttggtgtaaggatggacatgttgaaaccttctacccaaaactacaagcaagtcaagcgtggcaaccaggtgttgcgatgcctaacttgtacaagatgcaaagaatgcttcttgaaaagtgtgaccttcagaattatggtgaaaatgctgttataccaaaaggaataatgatgaatgtcgcaaagtatactcaactgtgtcaatacttaaatacacttactttagctgtaccctacaacatgagagttattcactttggtgctggctctgataaaggagttgcaccaggtacagctgtgctcagacaatggttgccaactggcacactacttgtcgattcagatcttaatgacttcgtctccgacgcagattctactttaattggagactgtgcaacagtacatacggctaataaatgggaccttattattagcgatatgtatgaccctaggaccaaacatgtgacaaaagagaatgactctaaagaagggtttttcacttatctgtgtggatttataaagcaaaaactagccctgggtggttctatagctgtaaagataacagagcattcttggaatgctgacctttacaagcttatgggccatttctcatggtggacagcttttgttacaaatgtaaatgcatcatcatcggaagcatttttaattggggctaactatcttggcaagccgaaggaacaaattgatggctataccatgcatgctaactacattttctggaggaacacaaatcctatccagttgtcttcctattcactctttgacatgagcaaatttcctcttaaattaagaggaactgctgtaatgtctcttaaggagaatcaaatcaatgatatgatttattctcttctggaaaaaggtaggcttatcattagagaaaacaacagagttgtggtttcaagtgatattcttgttaacaactaaacgaacatgtttattttcttattatttcttactctcactagtggtagtgaccttgaccggtgcaccacttttgatgatgttcaagctcctaattacactcaacatacttcatctatgaggggggtttactatcctgatgaaatttttagatcagacactctttatttaactcaggatttatttcttccattttattctaatgttacagggtttcatactattaatcatacgtttggcaaccctgtcataccttttaaggatggtatttattttgctgccacagagaaatcaaatgttgtccgtggttgggtttttggttctaccatgaacaacaagtcacagtcggtgattattattaacaattctactaatgttgttatacgagcatgtaactttgaattgtgtgacaaccctttctttgctgtttctaaacccatgggtacacagacacatactatgatattcgataatgcatttaattgcactttcgagtacatatctgatgccttttcgcttgatgtttcagaaaagtcaggtaattttaaacacttacgagagtttgtgtttaaaaataaagatgggtttctctatgtttataagggctatcaacctatagatgtagttcgtgatctaccttctggttttaacactttgaaacctatttttaagttgcctcttggtattaacattacaaattttagagccattcttacagccttttcacctgctcaagacatttggggcacgtcagctgcagcctattttgttggctatttaaagccaactacatttatgctcaagtatgatgaaaatggtacaatcacagatgctgttgattgttctcaaaatccacttgctgaactcaaatgctctgttaagagctttgagattgacaaaggaatttaccagacctctaatttcagggttgttccctcaggagatgttgtgagattccctaatattacaaacttgtgtccttttggagaggtttttaatgctactaaattcccttctgtctatgcatgggagagaaaaaaaatttctaattgtgttgctgattactctgtgctctacaactcaacatttttttcaacctttaagtgctatggcgtttctgccactaagttgaatgatctttgcttctccaatgtctatgcagattcttttgtagtcaagggagatgatgtaagacaaatagcgccaggacaaactggtgttattgctgattataattataaattgccagatgatttcatgggttgtgtccttgcttggaatactaggaacattgatgctacttcaactggtaattataattataaatataggtatcttagacatggcaagcttaggccctttgagagagacatatctaatgtgcctttctcccctgatggcaaaccttgcaccccacctgctcttaattgttattggccattaaatgattatggtttttacaccactactggcattggctaccaaccttacagagttgtagtactttcttttgaacttttaaatgcaccggccacggtttgtggaccaaaattatccactgaccttattaagaaccagtgtgtcaattttaattttaatggactcactggtactggtgtgttaactccttcttcaaagagatttcaaccatttcaacaatttggccgtgatgtttctgatttcactgattccgttcgagatcctaaaacatctgaaatattagacatttcaccttgctcttttgggggtgtaagtgtaattacacctggaacaaatgcttcatctgaagttgctgttctatatcaagatgttaactgcactgatgtttctacagcaattcatgcagatcaactcacaccagcttggcgcatatattctactggaaacaatgtattccagactcaagcaggctgtcttataggagctgagcatgtcgacacttcttatgagtgcgacattcctattggagctggcatttgtgctagttaccatacagtttctttattacgtagtactagccaaaaatctattgtggcttatactatgtctttaggtgctgatagttcaattgcttactctaataacaccattgctatacctactaacttttcaattagcattactacagaagtaatgcctgtttctatggctaaaacctccgtagattgtaatatgtacatctgcggagattctactgaatgtgctaatttgcttctccaatatggtagcttttgcacacaactaaatcgtgcactctcaggtattgctgctgaacaggatcgcaacacacgtgaagtgttcgctcaagtcaaacaaatgtacaaaaccccaactttgaaatattttggtggttttaatttttcacaaatattacctgaccctctaaagccaactaagaggtcttttattgaggacttgctctttaataaggtgacactcgctgatgctggcttcatgaagcaatatggcgaatgcctaggtgatattaatgctagagatctcatttgtgcgcagaagttcaatggacttacagtgttgccacctctgctcactgatgatatgattgctgcctacactgctgctctagttagtggtactgccactgctggatggacatttggtgctggcgctgctcttcaaataccttttgctatgcaaatggcatataggttcaatggcattggagttacccaaaatgttctctatgagaaccaaaaacaaatcgccaaccaatttaacaaggcgattagtcaaattcaagaatcacttacaacaacatcaactgcattgggcaagctgcaagacgttgttaaccagaatgctcaagcattaaacacacttgttaaacaacttagctctaattttggtgcaatttcaagtgtgctaaatgatatcctttcgcgacttgataaagtcgaggcggaggtacaaattgacaggttaattacaggcagacttcaaagccttcaaacctatgtaacacaacaactaatcagggctgctgaaatcagggcttctgctaatcttgctgctactaaaatgtctgagtgtgttcttggacaatcaaaaagagttgacttttgtggaaagggctaccaccttatgtccttcccacaagcagccccgcatggtgttgtcttcctacatgtcacgtatgtgccatcccaggagaggaacttcaccacagcgccagcaatttgtcatgaaggcaaagcatacttccctcgtgaaggtgtttttgtgtttaatggcacttcttggtttattacacagaggaacttcttttctccacaaataattactacagacaatacatttgtctcaggaaattgtgatgtcgttattggcatcattaacaacacagtttatgatcctctgcaacctgagcttgactcattcaaagaagagctggacaagtacttcaaaaatcatacatcaccagatgttgatcttggcgacatttcaggcattaacgcttctgtcgtcaacattcaaaaagaaattgaccgcctcaatgaggtcgctaaaaatttaaatgaatcactcattgaccttcaagaattgggaaaatatgagcaatatattaaatggccttggtatgtttggctcggcttcattgctggactaattgccatcgtcatggttacaatcttgctttgttgcatgactagttgttgcagttgcctcaagggtgcatgctcttgtggttcttgctgcaagtttgatgaggatgactctgagccagttctcaagggtgtcaaattacattacacataaacgaacttatggatttgtttatgagattttttactcttggatcaattactgcacagccagtaaaaattgacaatgcttctcctgcaagtactgttcatgctacagcaacgataccgctacaagcctcactccctttcggatggcttgttattggcgttgcatttcttgctgtttttcagagcgctaccaaaataattgcgctcaataaaagatggcagctagccctttataagggcttccagttcatttgcaatttactgctgctatttgttaccatctattcacatcttttgcttgtcgctgcaggtatggaggcgcaatttttgtacctctatgccttgatatattttctacaatgcatcaacgcatgtagaattattatgagatgttggctttgttggaagtgcaaatccaagaacccattactttatgatgccaactactttgtttgctggcacacacataactatgactactgtataccatataacagtgtcacagatacaattgtcgttactgaaggtgacggcatttcaacaccaaaactcaaagaagactaccaaattggtggttattctgaggataggcactcaggtgttaaagactatgtcgttgtacatggctatttcaccgaagtttactaccagcttgagtctacacaaattactacagacactggtattgaaaatgctacattcttcatctttaacaagcttgttaaagacccaccgaatgtgcaaatacacacaatcgacggctcttcaggagttgctaatccagcaatggatccaatttatgatgagccgacgacgactactagcgtgcctttgtaagcacaagaaagtgagtacgaacttatgtactcattcgtttcggaagaaacaggtacgttaatagttaatagcgtacttctttttcttgctttcgtggtattcttgctagttacactagccatccttactgcgcttcgattgtgtgcgtactgctgcaatattgttaacgtgagtttagtaaaaccaacggtttacgtctactcgcgtgttaaaaatctgaactcttctgaaggagttcctgatcttctggtctaaacgaactaactattattattattctgtttggaactttaacattgcttatcatggcagacaacggtactattaccgttgaggagcttaaacaactcctggaacaatggaacctagtaataggtttcctatgcctagcctggattatgttactacaatttgcctattctaatcggaacaggtttttgtacataataaagcttgttttcctctggctcttgtggccagtaacacttgcttgttttgtgcttgctgctgtctacagaattaattgggtgactggcgggattgcgattgcaatggcttgtattgtaggcttgatgtggcttagctacttcgttgcttccttcaggctgtttgctcgtacccgctcaatgtggtcattcaacccagaaacaaacattcttctcaatgtgcctctccgggggacaattgtgaccagaccgctcatggaaagtgaacttgtcattggtgctgtgatcattcgtggtcacttgcgaatggccggacactccctagggcgctgtgacattaaggacctgccaaaagagatcactgtggctacatcacgaacgctttcttattacaaattaggagcgtcgcagcgtgtaggcactgattcaggttttgctgcatacaaccgctaccgtattggaaactataaattaaatacagaccacgccggtagcaacgacaatattgctttgctagtacagtaagtgacaacagatgtttcatcttgttgacttccaggttacaatagcagagatattgattatcattatgaggactttcaggattgctatttggaatcttgacgttaataagttcaatagtgagacaattatttaagcctctaactaagaagaattattcggagttagatgatgaagaacctatggagttagattatccataaaacgaacatgaaaattattctcttcctgacattgattgtatttacatcttgcgagctatatcactatcaggagtgtgttagaggtacgactgtactactaaaagaaccttgcccatcaggaacatacgagggcaattcaccatttcaccctcttgctgacaataaatttgcactaacttgcactagcacacactttgcttttgcttgtgctgacggtactcgacatacctatcagctgcgtgcaagatcagtttcaccaaaacttttcatcagacaagaggaggttcaacaagagctctactcgccactttttctcattgttgctgctctagtatttttaatactttgcttcaccattaagagaaagacagaatgaatgagctcactttaattgacttctatttgtgctttttagcctttctgctattccttgttttaataatgcttattatattttggttttcactcgaaatccaggatctagaagaaccttgtaccaaagtctaaacgaacatgaaacttctcattgttttgacttgtatttctttatgcagttgcatatgcactgtagtacagcgctgtgcatctaataaacctcatgtgcttgaagatccttgtaaggtacaacactaggggtaatacttatagcactgcttggctttgtgctctaggaaaggttttaccttttcatagatggcacactatggttcaaacatgcacacctaatgttactatcaactgtcaagatccagctggtggtgcgcttatagctaggtgttggtaccttcatgaaggtcaccaaactgctgcatttagagacgtacttgttgttttaaataaacgaacaaattaaaatgtctgataatggaccccaatcaaaccaacgtagtgccccccgcattacatttggtggacccacagattcaactgacaataaccagaatggaggacgcaatggggcaaggccaaaacagcgccgaccccaaggtttacccaataatactgcgtcttggttcacagctctcactcagcatggcaaggaggaacttagattccctcgaggccagggcgttccaatcaacaccaatagtggtccagatgaccaaattggctactaccgaagagctacccgacgagttcgtggtggtgacggcaaaatgaaagagctcagccccagatggtacttctattacctaggaactggcccagaagcttcacttccctacggcgctaacaaagaaggcatcgtatgggttgcaactgagggagccttgaatacacccaaagaccacattggcacccgcaatcctaataacaatgctgccaccgtgctacaacttcctcaaggaacaacattgccaaaaggcttctacgcagagggaagcagaggcggcagtcaagcctcttctcgctcctcatcacgtagtcgcggtaattcaagaaattcaactcctggcagcagtaggggaaattctcctgctcgaatggctagcggaggtggtgaaactgccctcgcgctattgctgctagacagattgaaccagcttgagagcaaagtttctggtaaaggccaacaacaacaaggccaaactgtcactaagaaatctgctgctgaggcatctaaaaagcctcgccaaaaacgtactgccacaaaacagtacaacgtcactcaagcatttgggagacgtggtccagaacaaacccaaggaaatttcggggaccaagacctaatcagacaaggaactgattacaaacattggccgcaaattgcacaatttgctccaagtgcctctgcattctttggaatgtcacgcattggcatggaagtcacaccttcgggaacatggctgacttatcatggagccattaaattggatgacaaagatccacaattcaaagacaacgtcatactgctgaacaagcacattgacgcatacaaaacattcccaccaacagagcctaaaaaggacaaaaagaaaaagactgatgaagctcagcctttgccgcagagacaaaagaagcagcccactgtgactcttcttcctgcggctgacatggatgatttctccagacaacttcaaaattccatgagtggagcttctgctgattcaactcaggcataaacactcatgatgaccacacaaggcagatgggctatgtaaacgttttcgcaattccgtttacgatacatagtctactcttgtgcagaatgaattctcgtaactaaacagcacaagtaggtttagttaactttaatctcacatagcaatctttaatcaatgtgtaacattagggaggacttgaaagagccaccacattttcatcgaggccacgcggagtacgatcgagggtacagtgaataatgctagggagagctgcctatatggaagagccctaatgtgtaaaattaattttagtagtgctatccccatgtgattttaatagcttcttaggagaatgac

SEQ ID NO: 82 - DNA, 29727 bp, Coronavirus
atattaggtttttacctacccaggaaaagccaaccaacctcgatctcttgtagatctgttctctaaacgaactttaaaatctgtgtagctgtcgctcggctgcatgcctagtgcacctacgcagtataaacaataataaattttactgtcgttgacaagaaacgagtaactcgtccctcttctgcagactgcttacggtttcgtccgtgttgcagtcgatcatcagcatacctaggtttcgtccgggtgtgaccgaaaggtaagatggagagccttgttcttggtgtcaacgagaaaacacacgtccaactcagtttgcctgtccttcaggttagagacgtgctagtgcgtggcttcggggactctgtggaagaggccctatcggaggcacgtgaacacctcaaaaatggcacttgtggtctagtagagctggaaaaaggcgtactgccccagcttgaacagccctatgtgttcattaaacgttctgatgccttaagcaccaatcacggccacaaggtcgttgagctggttgcagaaatggacggcattcagtacggtcgtagcggtataacactgggagtactcgtgccacatgtgggcgaaaccccaattgcataccgcaatgttcttcttcgtaagaacggtaataagggagccggtggtcatagctatggcatcgatctaaagtcttatgacttaggtgacgagcttggcactgatcccattgaagattatgaacaaaactggaacactaagcatggcagtggtgcactccgtgaactcactcgtgagctcaatggaggtgcagtcactcgctatgtcgacaacaatttctgtggcccagatgggtaccctcttgattgcatcaaagattttctcgcacgcgcgggcaagtcaatgtgcactctttccgaacaacttgattacatcgagtcgaagagaggtgtctactgctgccgtgaccatgagcatgaaattgcctggttcactgagcgctctgataagagctacgagcaccagacacccttcgaaattaagagtgccaagaaatttgacactttcaaaggggaatgcccaaagtttgtgtttcctcttaactcaaaagtcaaagtcattcaaccacgtgttgaaaagaaaaagactgagggtttcatggggcgtatacgctctgtgtaccctgttgcatctccacaggagtgtaacaatatgcacttgtctaccttgatgaaatgtaatcattgcgatgaagtttcatggcagacgtgcgactttctgaaagccacttgtgaacattgtggcactgaaaatttagttattgaaggacctactacatgtgggtacctacctactaatgctgtagtgaaaatgccatgtcctgcctgtcaagacccagagattggacctgagcatagtgttgcagattatcacaaccactcaaacattgaaactcgactccgcaagggaggtaggactagatgttttggaggctgtgtgtttgcctatgttggctgctataataagcgtgcctactgggttcctcgtgctagtgctgatattggctcaggccatactggcattactggtgacaatgtggagaccttgaatgaggatctccttgagatactgagtcgtgaacgtgttaacattaacattgttggcgattttcatttgaatgaagaggttgccatcattttggcatctttctctgcttctacaagtgcctttattgacactataaagagtcttgattacaagtctttcaaaaccattgttgagtcctgcggtaactataaagttaccaagggaaagcccgtaaaaggtgcttggaacattggacaacagagatcagttttaacaccactgtgtggttttccctcacaggctgctggtgttatcagatcaatttttgcgcgcacacttgatgcagcaaaccactcaattcctgatttgcaaagagcagctgtcaccatacttgatggtatttctgaacagtcattacgtcttgtcgacgccatggtttatacttcagacctgctcaccaacagtgtcattattatggcatatgtaactggtggtcttgtacaacagacttctcagtggttgtctaatcttttgggcactactgttgaaaaactcaggcctatctttgaatggattgaggcgaaacttagtgcaggagttgaatttctcaaggatgcttgggagattctcaaatttctcattacaggtgtttttgacatcgtcaagggtcaaatacaggttgcttcagataacatcaaggattgtgtaaaatgcttcattgatgttgttaacaaggcactcgaaatgtgcattgatcaagtcactatcgctggcgcaaagttgcgatcactcaacttaggtgaagtcttcatcgctcaaagcaagggactttaccgtcagtgtatacgtggcaaggagcagctgcaactactcatgcctcttaaggcaccaaaagaagtaacctttcttgaaggtgattcacatgacacagtacttacctctgaggaggttgttctcaagaacggtgaactcgaagcactcgagacgcccgttgatagcttcacaaatggagctatcgttggcacaccagtctgtgtaaatggcctcatgctcttagagattaaggacaaagaacaatactgcgcattgtctcctggtttactggctacaaacaatgtctttcgcttaaaagggggtgcaccaattaaaggtgtaacctttggagaagatactgtttgggaagttcaaggttacaagaatgtgagaatcacatttgagcttgatgaacgtgttgacaaagtgcttaatgaaaagtgctctgtctacactgttgaatccggtaccgaagttactgagtttgcatgtgttgtagcagaggctgttgtgaagactttacaaccagtttctgatctccttaccaacatgggtattgatcttgatgagtggagtgtagctacattctacttatttgatgatgctggtgaagaaaacttttcatcacgtatgtattgttccttttaccctccagatgaggaagaagaggacgatgcagagtgtgaggaagaagaaattgatgaaacctgtgaacatgagtacggtacagaggatgattatcaaggtctccctctggaatttggtgcctcagctgaaacagttcgagttgaggaagaagaagaggaagactggctggatgatactactgagcaatcagagattgagccagaaccagaacctacacctgaagaaccagttaatcagtttactggttatttaaaacttactgacaatgttgccattaaatgtgttgacatcgttaaggaggcacaaagtgctaatcctatggtgattgtaaatgctgctaacatacacctgaaacatggtggtggtgtagcaggtgcactcaacaaggcaaccaatggtgccatgcaaaaggagagtgatgattacattaagctaaatggccctcttacagtaggagggtcttgtttgctttctggacataatcttgctaagaagtgtctgcatgttgttggacctaacctaaatgcaggtgaggacatccagcttcttaaggcagcatatgaaaatttcaattcacaggacatcttacttgcaccattgttgtcagcaggcatatttggtgctaaaccacttcagtctttacaagtgtgcgtgcagacggttcgtacacaggtttatattgcagtcaatgacaaagctctttatgagcaggttgtcatggattatcttgataacctgaagcctagagtggaagcacctaaacaagaggagccaccaaacacagaagattccaaaactgaggagaaatccgtcgtacagaagcctgtcgatgtgaagccaaaaattaaggcctgcattgatgaggttaccacaacactggaagaaactaagtttcttaccaataagttactcttgtttgctgatatcaatggtaagctttaccatgattctcagaacatgcttagaggtgaagatatgtctttccttgagaaggatgcaccttacatggtaggtgatgttatcactagtggtgatatcacttgtgttgtaataccctccaaaaaggctggtggcactactgagatgctctcaagagctttgaagaaagtgccagttgatgagtatataaccacgtaccctggacaaggatgtgctggttatacacttgaggaagctaagactgctcttaagaaatgcaaatctgcattttatgtactaccttcagaagcacctaatgctaaggaagagattctaggaactgtatcctggaatttgagagaaatgcttgctcatgctgaagagacaagaaaattaatgcctatatgcatggatgttagagccataatggcaaccatccaacgtaagtataaaggaattaaaattcaagagggcatcgttgactatggtgtccgattcttcttttatactagtaaagagcctgtagcttctattattacgaagctgaactctctaaatgagccgcttgtcacaatgccaattggttatgtgacacatggttttaatcttgaagaggctgcgcgctgtatgcgttctcttaaagctcctgccgtagtgtcagtatcatcaccagatgctgttactacatataatggatacctcacttcgtcatcaaagacatctgaggagcactttgtagaaacagtttctttggctggctcttacagagattggtcctattcaggacagcgtacagagttaggtgttgaatttcttaagcgtggtgacaaaattgtgtaccacactctggagagccccgtcgagtttcatcttgacggtgaggttctttcacttgacaaactaaagagtctcttatccctgcgggaggttaagactataaaagtgttcacaactgtggacaacactaatctccacacacagcttgtggatatgtctatgacatatggacagcagtttggtccaacatacttggatggtgctgatgttacaaaaattaaacctcatgtaaatcatgagggtaagactttctttgtactacctagtgatgacacactacgtagtgaagctttcgagtactaccatactcttgatgagagttttcttggtaggtacatgtctgctttaaaccacacaaagaaatggaaatttcctcaagttggtggtttaacttcaattaaatgggctgataacaattgttatttgtctagtgttttattagcacttcaacagcttgaagtcaaattcaatgcaccagcacttcaagaggcttattatagagcccgtgctggtgatgctgctaacttttgtgcactcatactcgcttacagtaataaaactgttggcgagcttggtgatgtcagagaaactatgacccatcttctacagcatgctaatttggaatctgcaaagcgagttcttaatgtggtgtgtaaacattgtggtcagaaaactactaccttaacgggtgtagaagctgtgatgtatatgggtactctatcttatgataatcttaagacaggtgtttccattccatgtgtgtgtggtcgtgatgctacacaatatctagtacaacaagagtcttcttttgttatgatgtctgcaccacctgctgagtataaattacagcaaggtacattcttatgtgcgaatgagtacactggtaactatcagtgtggtcattacactcatataactgctaaggagaccctctatcgtattgacggagctcaccttacaaagatgtcagagtacaaaggaccagtgactgatgttttctacaaggaaacatcttacactacaaccatcaagcctgtgtcgtataaactcgatggagttacttacacagagattgaaccaaaattggatgggtattataaaaaggataatgcttactatacagagcagcctatagaccttgtaccaactcaaccattaccaaatgcgagttttgataatttcaaactcacatgttctaacacaaaatttgctgatgatttaaatcaaatgacaggcttcacaaagccagcttcacgagagctatctgtcacattcttcccagacttgaatggcgatgtagtggctattgactatagacactattcagcgagtttcaagaaaggtgctaaattactgcataagccaattgtttggcacattaaccaggctacaaccaagacaacgttcaaaccaaacacttggtgtttacgttgtctttggagtacaaagccagtagatacttcaaattcatttgaagttctggcagtagaagacacacaaggaatggacaatcttgcttgtgaaagtcaacaacccacctctgaagaagtagtggaaaatcctaccatacagaaggaagtcatagagtgtgacgtgaaaactaccgaagttgtaggcaatgtcatacttaaaccatcagatgaaggtgttaaagtaacacaagagttaggtcatgaggatcttatggctgcttatgtggaaaacacaagcattaccattaagaaacctaatgagctttcactagccttaggtttaaaaacaattgccactcatggtattgctgcaattaatagtgttccttggagtaaaattttggcttatgtcaaaccattcttaggacaagcagcaattacaacatcaaattgcgctaagagattagcacaacgtgtgtttaacaattatatgccttatgtgtttacattattgttccaattgtgtacttttactaaaagtaccaattctagaattagagcttcactacctacaactattgctaaaaatagtgttaagagtgttgctaaattatgtttggatgccggcattaattatgtgaagtcacccaaattttctaaattgttcacaatcgctatgtggctattgttgttaagtatttgcttaggttctctaatctgtgtaactgctgcttttggtgtactcttatctaattttggtgctccttcttattgtaatggcgttagagaattgtatcttaattcgtctaacgttactactatggatttctgtgaaggttcttttccttgcagcatttgtttaagtggattagactcccttgattcttatccagctcttgaaaccattcaggtgacgatttcatcgtacaagctagacttgacaattttaggtctggccgctgagtgggttttggcatatatgttgttcacaaaattcttttatttattaggtctttcagctataatgcaggtgttctttggctattttgctagtcatttcatcagcaattcttggctcatgtggtttatcattagtattgtacaaatggcacccgtttctgcaatggttaggatgtacatcttctttgcttctttctactacatatggaagagctatgttcatatcatggatggttgcacctcttcgacttgcatgatgtgctataagcgcaatcgtgccacacgcgttgagtgtacaactattgttaatggcatgaagagatctttctatgtctatgcaaatggaggccgtggcttctgcaagactcacaattggaattgtctcaattgtgacacattttgcactggtagtacattcattagtgatgaagttgctcgtgatttgtcactccagtttaaaagaccaatcaaccctactgaccagtcatcgtatattgttgatagtgttgctgtgaaaaatggcgcgcttcacctctactttgacaaggctggtcaaaagacctatgagagacatccgctctcccattttgtcaatttagacaatttgagagctaacaacactaaaggttcactgcctattaatgtcatagtttttgatggcaagtccaaatgcgacgagtctgcttctaagtctgcttctgtgtactacagtcagctgatgtgccaacctattctgttgcttgaccaagctcttgtatcagacgttggagatagtactgaagtttccgttaagatgtttgatgcttatgtcgacaccttttcagcaacttttagtgttcctatggaaaaacttaaggcacttgttgctacagctcacagcgagttagcaaagggtgtagctttagatggtgtcctttctacattcgtgtcagctgcccgacaaggtgttgttgataccgatgttgacacaaaggatgttattgaatgtctcaaactttcacatcactctgacttagaagtgacaggtgacagttgtaacaatttcatgctcacctataataaggttgaaaacatgacgcccagagatcttggcgcatgtattgactgtaatgcaaggcatatcaatgcccaagtagcaaaaagtcacaatgtttcactcatctggaatgtaaaagactacatgtctttatctgaacagctgcgtaaacaaattcgtagtgctgccaagaagaacaacataccttttagactaacttgtgctacaactagacaggttgtcaatgtcataactactaaaatctcactcaagggtggtaagattgttagtacttgttttaaacttatgcttaaggccacattattgtgcgttcttgctgcattggtttgttatatcgttatgccagtacatacattgtcaatccatgatggttacacaaatgaaatcattggttacaaagccattcaggatggtgtcactcgtgacatcatttctactgatgattgttttgcaaataaacatgctggttttgacgcatggtttagccagcgtggtggttcatacaaaaatgacaaaagctgccctgtagtagctgctatcattacaagagagattggtttcatagtgcctggcttaccgggtactgtgctgagagcaatcaatggtgacttcttgcattttctacctcgtgtttttagtgctgttggcaacatttgctacacaccttccaaactcattgagtatagtgattttgctacctctgcttgcgttcttgctgctgagtgtacaatttttaaggatgctatgggcaaacctgtgccatattgttatgacactaatttgctagagggttctatttcttatagtgagcttcgtccagacactcgttatgtgcttatggatggttccatcatacagtttcctaacacttacctggagggttctgttagagtagtaacaacttttgatgctgagtactgtagacatggtacatgcgaaaggtcagaagtaggtatttgcctatctaccagtggtagatgggttcttaataatgagcattacagagctctatcaggagttttctgtggtgttgatgcgatgaatctcatagctaacatctttactcctcttgtgcaacctgtgggtgctttagatgtgtctgcttcagtagtggctggtggtattattgccatattggtgacttgtgctgcctactactttatgaaattcagacgtgtttttggtgagtacaaccatgttgttgctgctaatgcacttttgtttttgatgtctttcactatactctgtctggtaccagcttacagctttctgccgggagtctactcagtcttttacttgtacttgacattctatttcaccaatgatgtttcattcttggctcaccttcaatggtttgccatgttttctcctattgtgcctttttggataacagcaatctatgtattctgtatttctctgaagcactgccattggttctttaacaactatcttaggaaaagagtcatgtttaatggagttacatttagtaccttcgaggaggctgctttgtgtacctttttgctcaacaaggaaatgtacctaaaattgcgtagcgagacactgttgccacttacacagtataacaggtatcttgctctatataacaagtacaagtatttcagtggagccttagatactaccagctatcgtgaagcagcttgctgccacttagcaaaggctctaaatgactttagcaactcaggtgctgatgttctctaccaaccaccacagacatcaatcacttctgctgttctgcagagtggttttaggaaaatggcattcccgtcaggcaaagttgaagggtgcatggtacaagtaacctgtggaactacaactcttaatggattgtggttggatgacacagtatactgtccaagacatgtcatttgcacagcagaagacatgcttaatcctaactatgaagatctgctcattcgcaaatccaaccatagctttcttgttcaggctggcaatgttcaacttcgtgttattggccattctatgcaaaattgtctgcttaggcttaaagttgatacttctaaccctaagacacccaagtataaatttgtccgtatccaacctggtcaaacattttcagttctagcatgctacaatggttcaccatctggtgtttatcagtgtgccatgagacctaatcataccattaaaggttctttccttaatggatcatgtggtagtgttggttttaacattgattatgattgcgtgtctttctgctatatgcatcatatggagcttccaacaggagtacacgctggtactgacttagaaggtaaattctatggtccatttgttgacagacaaactgcacaggctgcaggtacagacacaaccataacattaaatgttttggcatggctgtatgctgctgttatcaatggtgataggtggtttcttaatagattcaccactactttgaatgactttaaccttgtggcaatgaagtacaactatgaacctttgacacaagatcatgttgacatattgggacctctttctgctcaaacaggaattgccgtcttagatatgtgtgctgctttgaaagagctgctgcagaatggtatgaatggtcgtactatccttggtagcactattttagaagatgagtttacaccatttgatgttgttagacaatgctctggtgttaccttccaaggtaagttcaagaaaattgttaagggcactcatcattggatgcttttaactttcttgacatcactattgattcttgttcaaagtacacagtggtcactgtttttctttgtttacgagaatgctttcttgccatttactcttggtattatggcaattgctgcatgtgctatgctgcttgttaagcataagcacgcattcttgtgcttgtttctgttaccttctcttgcaacagttgcttactttaatatggtctacatgcctgctagctgggtgatgcgtatcatgacatggcttgaattggctgacactagcttgtctggttataggcttaaggattgtgttatgtatgcttcagctttagttttgcttattctcatgacagctcgcactgtttatgatgatgctgctagacgtgtttggacactgatgaatgtcattacacttgtttacaaagtctactatggtaatgctttagatcaagctatttccatgtgggccttagttatttctgtaacctctaactattctggtgtcgttacgactatcatgtttttagctagagctatagtgtttgtgtgtgttgagtattatccattgttatttattactggcaacaccttacagtgtatcatgcttgtttattgtttcttaggctattgttgctgctgctactttggccttttctgtttactcaaccgttacttcaggcttactcttggtgtttatgactacttggtctctacacaagaatttaggtatatgaactcccaggggcttttgcctcctaagagtagtattgatgctttcaagcttaacattaagttgttgggtattggaggtaaaccatgtatcaaggttgctactgtacagtctaaaatgtctgacgtaaagtgcacatctgtggtactgctctcggttcttcaacaacttagagtagagtcatcttctaaattgtgggcacaatgtgtacaactccacaatgatattcttcttgcaaaagacacaactgaagctttcgagaagatggtttctcttttgtctgttttgctatccatgcagggtgctgtagacattaataggttgtgcgaggaaatgctcgataaccgtgctactcttcaggctattgcttcagaatttagttctttaccatcatatgccgcttatgccactgcccaggaggcctatgagcaggctgtagctaatggtgattctgaagtcgttctcaaaaagttaaagaaatctttgaatgtggctaaatctgagtttgaccgtgatgctgccatgcaacgcaagttggaaaagatggcagatcaggctatgacccaaatgtacaaacaggcaagatctgaggacaagagggcaaaagtaactagtgctatgcaaacaatgctcttcactatgcttaggaagcttgataatgatgcacttaacaacattatcaacaatgcgcgtgatggttgtgttccactcaacatcataccattgactacagcagccaaactcatggttgttgtccctgattatggtacctacaagaacacttgtgatggtaacacctttacatatgcatctgcactctgggaaatccagcaagttgttgatgcggatagcaagattgttcaacttagtgaaattaacatggacaattcaccaaatttggcttggcctcttattgttacagctctaagagccaactcagctgttaaactacagaataatgaactgagtccagtagcactacgacagatgtcctgtgcggctggtaccacacaaacagcttgtactgatgacaatgcacttgcctactataacaattcgaagggaggtaggtttgtgctggcattactatcagaccaccaagatctcaaatgggctagattccctaagagtgatggtacaggtacaatttacacagaactggaaccaccttgtaggtttgttacagacacaccaaaagggcctaaagtgaaatacttgtacttcatcaaaggcttaaacaacctaaatagaggtatggtgctgggcagtttagctgctacagtacgtcttcaggctggaaatgctacagaagtacctgccaattcaactgtgctttccttctgtgcttttgcagtagaccctgctaaagcatataaggattacctagcaagtggaggacaaccaatcaccaactgtgtgaagatgttgtgtacacacactggtacaggacaggcaattactgtaacaccagaagctaacatggaccaagagtcctttggtggtgcttcatgttgtctgtattgtagatgccacattgaccatccaaatcctaaaggattctgtgacttgaaaggtaagtacgtccaaatacctaccacttgtgctaatgacccagtgggttttacacttagaaacacagtctgtaccgtctgcggaatgtggaaaggttatggctgtagttgtgaccaactccgcgaacccttgatgcagtctgcggatgcatcaacgtttttaaacgggtttgcggtgtaagtgcagcccgtcttacaccgtgcggcacaggcactagtactgatgtcgtctacagggcttttgatatttacaacgaaaaagttgctggttttgcaaagttcctaaaaactaattgctgtcgcttccaggagaaggatgaggaaggcaatttattagactcttactttgtagttaagaggcatactatgtctaactaccaacatgaagagactatttataacttggttaaagattgtccagcggttgctgtccatgactttttcaagtttagagtagatggtgacatggtaccacatatatcacgtcagcgtctaactaaatacacaatggctgatttagtctatgctctacgtcattttgatgagggtaattgtgatacattaaaagaaatactcgtcacatacaattgctgtgatgatgattatttcaataagaaggattggtatgacttcgtagagaatcctgacatcttacgcgtatatgctaacttaggtgagcgtgtacgccaatcattattaaagactgtacaattctgcgatgctatgcgtgatgcaggcattgtaggcgtactgacattagataatcaggatcttaatgggaactggtacgatttcggtgatttcgtacaagtagcaccaggctgcggagttcctattgtggattcatattactcattgctgatgcccatcctcactttgactagggcattggctgctgagtcccatatggatgctgatctcgcaaaaccacttattaagtgggatttgctgaaatatgattttacggaagagagactttgtctcttcgaccgttattttaaatattgggaccagacataccatcccaattgtattaactgtttggatgataggtgtatccttcattgtgcaaactttaatgtgttattttctactgtgtttccacctacaagttttggaccactagtaagaaaaatatttgtagatggtgttccttttgttgtttcaactggataccattttcgtgagttaggagtcgtacataatcaggatgtaaacttacatagctcgcgtctcagtttcaaggaacttttagtgtatgctgctgatccagctatgcatgcagcttctggcaatttattgctagataaacgcactacatgcttttcagtagctgcactaacaaacaatgttgcttttcaaactgtcaaacccggtaattttaataaagacttttatgactttgctgtgtctaaaggtttctttaaggaaggaagttctgttgaactaaaacacttcttctttgctcaggatggcaacgctgctatcagtgattatgactattatcgttataatctgccaacaatgtgtgatatcagacaactcctattcgtagttgaagttgttgataaatactttgattgttacgatggtggctgtattaatgccaaccaagtaatcgttaacaatctggataaatcagctggtttcccatttaataaatggggtaaggctagactttattatgactcaatgagttatgaggatcaagatgcacttttcgcgtatactaagcgtaatgtcatccctactataactcaaatgaatcttaagtatgccattagtgcaaagaatagagctcgcaccgtagctggtgtctctatctgtagtactatgacaaatagacagtttcatcagaaattattgaagtcaatagccgccactagaggagctactgtggtaattggaacaagcaagttttacggtggctggcataatatgttaaaaactgtttacagtgatgtagaaactccacaccttatgggttgggattatccaaaatgtgacagagccatgcctaacatgcttaggataatggcctctcttgttcttgctcgcaaacataacacttgctgtaacttatcacaccgtttctacaggttagctaacgagtgtgcgcaagtattaagtgagatggtcatgtgtggcggctcactatatgttaaaccaggtggaacatcatccggtgatgctacaactgcttatgctaatagtgtctttaacatttgtcaagctgttacagccaatgtaaatgcacttctttcaactgatggtaataagatagctgacaagtatgtccgcaatctacaacacaggctctatgagtgtctctatagaaatagggatgttgatcatgaattcgtggatgagttttacgcttacctgcgtaaacatttctccatgatgattctttctgatgatgccgttgtgtgctataacagtaactatgcggctcaaggtttagtagctagcattaagaactttaaggcagttctttattatcaaaataatgtgttcatgtctgaggcaaaatgttggactgagactgaccttactaaaggacctcacgaattttgctcacagcatacaatgctagttaaacaaggagatgattacgtgtacctgccttacccagatccatcaagaatattaggcgcaggctgttttgtcgatgatattgtcaaaacagatggtacacttatgattgaaaggttcgtgtcactggctattgatgcttacccacttacaaaacatcctaatcaggagtatgctgatgtctttcacttgtatttacaatacattagaaagttacatgatgagcttactggccacatgttggacatgtattccgtaatgctaactaatgataacacctcacggtactgggaacctgagttttatgaggctatgtacacaccacatacagtcttgcaggctgtaggtgcttgtgtattgtgcaattcacagacttcacttcgttgcggtgcctgtattaggagaccattcctatgttgcaagtgctgctatgaccatgtcatttcaacatcacacaaattagtgttgtctgttaatccctatgtttgcaatgccccaggttgtgatgtcactgatgtgacacaactgtatctaggaggtatgagctattattgcaagtcacataagcctcccattagttttccattatgtgctaatggtcaggtttttggtttatacaaaaacacatgtgtaggcagtgacaatgtcactgacttcaatgcgatagcaacatgtgattggactaatgctggcgattacatacttgccaacacttgtactgagagactcaagcttttcgcagcagaaacgctcaaagccactgaggaaacatttaagctgtcatatggtattgccactgtacgcgaagtactctctgacagagaattgcatctttcatgggaggttggaaaacctagaccaccattgaacagaaactatgtctttactggttaccgtgtaactaaaaatagtaaagtacagattggagagtacacctttgaaaaaggtgactatggtgatgctgttgtgtacagaggtactacgacatacaagttgaatgttggtgattactttgtgttgacatctcacactgtaatgccacttagtgcacctactctagtgccacaagagcactatgtgagaattactggcttgtacccaacactcaacatctcagatgagttttctagcaatgttgcaaattatcaaaaggtcggcatgcaaaagtactctacactccaaggaccacctggtactggtaagagtcattttgccatcggacttgctctctattacccatctgctcgcatagtgtatacggcatgctctcatgcagctgttgatgccctatgtgaaaaggcattaaaatatttgcccatagataaatgtagtagaatcatacctgcgcgtgcgcgcgtagagtgttttgataaattcaaagtgaattcaacactagaacagtatgttttctgcactgtaaatgcattgccagaaacaactgctgacattgtagtctttgatgaaatctctatggctactaattatgacttgagtgttgtcaatgctagacttcgtgcaaaacactacgtctatattggcgatcctgctcaattaccagccccccgcacattgctgactaaaggcacactagaaccagaatattttaattcagtgtgcagacttatgaaaacaataggtccagacatgttccttggaacttgtcgccgttgtcctgctgaaattgttgacactgtgagtgctttagtttatgacaataagctaaaagcacacaaggataagtcagctcaatgcttcaaaatgttctacaaaggtgttattacacatgatgtttcatctgcaatcaacagacctcaaataggcgttgtaagagaatttcttacacgcaatcctgcttggagaaaagctgtttttatctcaccttataattcacagaacgctgtagcttcaaaaatcttaggattgcctacgcagactgttgattcatcacagggttctgaatatgactatgtcatattcacacaaactactgaaacagcacactcttgtaatgtcaaccgcttcaatgtggctatcacaagggcaaaaattggcattttgtgcataatgtctgatagagatctttatgacaaactgcaatttacaagtctagaaataccacgtcgcaatgtggctacattacaagcagaaaatgtaactggactttttaaggactgtagtaagatcattactggtcttcatcctacacaggcacctacacacctcagcgttgatataaagttcaagactgaaggattatgtgttgacataccaggcataccaaaggacatgacctaccgtagactcatctctatgatgggtttcaaaatgaattaccaagtcaatggttaccctaatatgtttatcacccgcgaagaagctattcgtcacgttcgtgcgtggattggctttgatgtagagggctgtcatgcaactagagatgctgtgggtactaacctacctctccagctaggattttctacaggtgttaacttagtagctgtaccgactggttatgttgacactgaaaataacacagaattcaccagagttaatgcaaaacctccaccaggtgaccagtttaaacatcttataccactcatgtataaaggcttgccctggaatgtagtgcgtattaagatagtacaaatgctcagtgatacactgaaaggattgtcagacagagtcgtgttcgtcctttgggcgcatggctttgagcttacatcaatgaagtactttgtcaagattggacctgaaagaacgtgttgtctgtgtgacaaacgtgcaacttgcttttctacttcatcagatacttatgcctgctggaatcattctgtgggttttgactatgtctataacccatttatgattgatgttcagcagtggggctttacgggtaaccttcagagtaaccatgaccaacattgccaggtacatggaaatgcacatgtggctagttgtgatgctatcatgactagatgtttagcagtccatgagtgctttgttaagcgcgttgattggtctgttgaataccctattataggagatgaactgagggttaattctgcttgcagaaaagtacaacacatggttgtgaagtctgcattgcttgctgataagtttccagttcttcatgacattggaaatccaaaggctatcaagtgtgtgcctcaggctgaagtagaatggaagttctacgatgctcagccatgtagtgacaaagcttacaaaatagaggaactcttctattcttatgctacacatcacgataaattcactgatggtgtttgtttgttttggaattgtaacgttgatcgttacccagccaatgcaattgtgtgtaggtttgacacaagagtcttgtcaaacttgaacttaccaggctgtgatggtggtagtttgtatgtgaataagcatgcattccacactccagctttcgataaaagtgcatttactaatttaaagcaattgcctttcttttactattctgatagtccttgtgagtctcatggcaaacaagtagtgtcggatattgattatgttccactcaaatctgctacgtgtattacacgatgcaatttaggtggtgctgtttgcagacaccatgcaaatgagtaccgacagtacttggatgcatataatatgatgatttctgctggatttagcctatggatttacaaacaatttgatacttataacctgtggaatacatttaccaggttacagagtttagaaaatgtggcttataatgttgttaataaaggacactttgatggacacgccggcgaagcacctgtttccatcattaataatgctgtttacacaaaggtagatggtattgatgtggagatctttgaaaataagacaacacttcctgttaatgttgcatttgagctttgggctaagcgtaacattaaaccagtgccagagattaagatactcaataatttgggtgttgatatcgctgctaatactgtaatctgggactacaaaagagaagccccagcacatgtatctacaataggtgtctgcacaatgactgacattgccaagaaacctactgagagtgcttgttcttcacttactgtcttgtttgatggtagagtggaaggacaggtagacctttttagaaacgcccgtaatggtgttttaataacagaaggttcagtcaaaggtctaacaccttcaaagggaccagcacaagctagcgtcaatggagtcacattaattggagaatcagtaaaaacacagtttaactactttaagaaagtagacggcattattcaacagttgcctgaaacctactttactcagagcagagacttagaggattttaagcccagatcacaaatggaaactgactttctcgagctcgctatggatgaattcatacagcgatataagctcgagggctatgccttcgaacacatcgtttatggagatttcagtcatggacaacttggcggtcttcatttaatgataggcttagccaagcgctcacaagattcaccacttaaattagaggattttatccctatggacagcacagtgaaaaattacttcataacagatgcgcaaacaggttcatcaaaatgtgtgtgttctgtgattgatcttttacttgatgactttgtcgagataataaagtcacaagatttgtcagtgatttcaaaagtggtcaaggttacaattgactatgctgaaatttcattcatgctttggtgtaaggatggacatgttgaaaccttctacccaaaactacaagcaagtcaagcgtggcaaccaggtgttgcgatgcctaacttgtacaagatgcaaagaatgcttcttgaaaagtgtgaccttcagaattatggtgaaaatgctgttataccaaaaggaataatgatgaatgtcgcaaagtatactcaactgtgtcaatacttaaatacacttactttagctgtaccctacaacatgagagttattcactttggtgctggctctgataaaggagttgcaccaggtacagctgtgctcagacaatggttgccaactggcacactacttgtcgattcagatcttaatgacttcgtctccgacgcagattctactttaattggagactgtgcaacagtacatacggctaataaatgggaccttattattagcgatatgtatgaccctaggaccaaacatgtgacaaaagagaatgactctaaagaagggtttttcacttatctgtgtggatttataaagcaaaaactagccctgggtggttctatagctgtaaagataacagagcattcttggaatgctgacctttacaagcttatgggccatttctcatggtggacagcttttgttacaaatgtaaatgcatcatcatcggaagcatttttaattggggctaactatcttggcaagccgaaggaacaaattgatggctataccatgcatgctaactacattttctggaggaacacaaatcctatccagttgtcttcctattcactctttgacatgagcaaatttcctcttaaattaagaggaactgctgtaatgtctcttaaggagaatcaaatcaatgatatgatttattctcttctggaaaaaggtaggcttatcattagagaaaacaacagagttgtggtttcaagtgatattcttgttaacaactaaacgaacatgtttattttcttattatttcttactctcactagtggtagtgaccttgaccggtgcaccacttttgatgatgttcaagctcctaattacactcaacatacttcatctatgaggggggtttactatcctgatgaaatttttagatcagacactctttatttaactcaggatttatttcttccattttattctaatgttacagggtttcatactattaatcatacgtttggcaaccctgtcataccttttaaggatggtatttattttgctgccacagagaaatcaaatgttgtccgtggttgggtttttggttctaccatgaacaacaagtcacagtcggtgattattattaacaattctactaatgttgttatacgagcatgtaactttgaattgtgtgacaaccctttctttgctgtttctaaacccatgggtacacagacacatactatgatattcgataatgcatttaattgcactttcgagtacatatctgatgccttttcgcttgatgtttcagaaaagtcaggtaattttaaacacttacgagagtttgtgtttaaaaataaagatgggtttctctatgtttataagggctatcaacctatagatgtagttcgtgatctaccttctggttttaacactttgaaacctatttttaagttgcctcttggtattaacattacaaattttagagccattcttacagccttttcacctgctcaagacatttggggcacgtcagctgcagcctattttgttggctatttaaagccaactacatttatgctcaagtatgatgaaaatggtacaatcacagatgctgttgattgttctcaaaatccacttgctgaactcaaatgctctgttaagagctttgagattgacaaaggaatttaccagacctctaatttcagggttgttccctcaggagatgttgtgagattccctaatattacaaacttgtgtccttttggagaggtttttaatgctactaaattcccttctgtctatgcatgggagagaaaaaaaatttctaattgtgttgctgattactctgtgctctacaactcaacatttttttcaacctttaagtgctatggcgtttctgccactaagttgaatgatctttgcttctccaatgtctatgcagattcttttgtagtcaagggagatgatgtaagacaaatagcgccaggacaaactggtgttattgctgattataattataaattgccagatgatttcatgggttgtgtccttgcttggaatactaggaacattgatgctacttcaactggtaattataattataaatataggtatcttagacatggcaagcttaggccctttgagagagacatatctaatgtgcctttctcccctgatggcaaaccttgcaccccacctgctcttaattgttattggccattaaatgattatggtttttacaccactactggcattggctaccaaccttacagagttgtagtactttcttttgaacttttaaatgcaccggccacggtttgtggaccaaaattatccactgaccttattaagaaccagtgtgtcaattttaattttaatggactcactggtactggtgtgttaactccttcttcaaagagatttcaaccatttcaacaatttggccgtgatgtttctgatttcactgattccgttcgagatcctaaaacatctgaaatattagacatttcaccttgctcttttgggggtgtaagtgtaattacacctggaacaaatgcttcatctgaagttgctgttctatatcaagatgttaactgcactgatgtttctacagcaattcatgcagatcaactcacaccagcttggcgcatatattctactggaaacaatgtattccagactcaagcaggctgtcttataggagctgagcatgtcgacacttcttatgagtgcgacattcctattggagctggcatttgtgctagttaccatacagtttctttattacgtagtactagccaaaaatctattgtggcttatactatgtctttaggtgctgatagttcaattgcttactctaataacaccattgctatacctactaacttttcaattagcattactacagaagtaatgcctgtttctatggctaaaacctccgtagattgtaatatgtacatctgcggagattctactgaatgtgctaatttgcttctccaatatggtagcttttgcacacaactaaatcgtgcactctcaggtattgctgctgaacaggatcgcaacacacgtgaagtgttcgctcaagtcaaacaaatgtacaaaaccccaactttgaaatattttggtggttttaatttttcacaaatattacctgaccctctaaagccaactaagaggtcttttattgaggacttgctctttaataaggtgacactcgctgatgctggcttcatgaagcaatatggcgaatgcctaggtgatattaatgctagagatctcatttgtgcgcagaagttcaatggacttacagtgttgccacctctgctcactgatgatatgattgctgcctacactgctgctctagttagtggtactgccactgctggatggacatttggtgctggcgctgctcttcaaataccttttgctatgcaaatggcatataggttcaatggcattggagttacccaaaatgttctctatgagaaccaaaaacaaatcgccaaccaatttaacaaggcgattagtcaaattcaagaatcacttacaacaacatcaactgcattgggcaagctgcaagacgttgttaaccagaatgctcaagcattaaacacacttgttaaacaacttagctctaattttggtgcaatttcaagtgtgctaaatgatatcctttcgcgacttgataaagtcgaggcggaggtacaaattgacaggttaattacaggcagacttcaaagccttcaaacctatgtaacacaacaactaatcagggctgctgaaatcagggcttctgctaatcttgctgctactaaaatgtctgagtgtgttcttggacaatcaaaaagagttgacttttgtggaaagggctaccaccttatgtccttcccacaagcagccccgcatggtgttgtcttcctacatgtcacgtatgtgccatcccaggagaggaacttcaccacagcgccagcaatttgtcatgaaggcaaagcatacttccctcgtgaaggtgtttttgtgtttaatggcacttcttggtttattacacagaggaacttcttttctccacaaataattactacagacaatacatttgtctcaggaaattgtgatgtcgttattggcatcattaacaacacagtttatgatcctctgcaacctgagcttgactcattcaaagaagagctggacaagtacttcaaaaatcatacatcaccagatgttgatcttggcgacatttcaggcattaacgcttctgtcgtcaacattcaaaaagaaattgaccgcctcaatgaggtcgctaaaaatttaaatgaatcactcattgaccttcaagaattgggaaaatatgagcaatatattaaatggccttggtatgtttggctcggcttcattgctggactaattgccatcgtcatggttacaatcttgctttgttgcatgactagttgttgcagttgcctcaagggtgcatgctcttgtggttcttgctgcaagtttgatgaggatgactctgagccagttctcaagggtgtcaaattacattacacataaacgaacttatggatttgtttatgagattttttactcttggatcaattactgcacagccagtaaaaattgacaatgcttctcctgcaagtactgttcatgctacagcaacgataccgctacaagcctcactccctttcggatggcttgttattggcgttgcatttcttgctgtttttcagagcgctaccaaaataattgcgctcaataaaagatggcagctagccctttataagggcttccagttcatttgcaatttactgctgctatttgttaccatctattcacatcttttgcttgtcgctgcaggtatggaggcgcaatttttgtacctctatgccttgatatattttctacaatgcatcaacgcatgtagaattattatgagatgttggttttgttggaagtgcaaatccaagaacccattactttatgatgccaactactttgtttgctggcacacacataactatgactactgtataccatataacagtgtcacagatacaattgtcgttactgaaggtgacggcatttcaacaccaaaactcaaagaagactaccaaattggtggttattctgaggataggcactcaggtgttaaagactatgtcgttgtacatggctatttcaccgaagtttactaccagcttgagtctacacaaattactacagacactggtattgaaaatgctacattcttcatctttaacaagcttgttaaagacccaccgaatgtgcaaatacacacaatcgacggctcttcaggagttgctaatccagcaatggatccaatttatgatgagccgacgacgactactagcgtgcctttgtaagcacaagaaagtgagtacgaacttatgtactcattcgtttcggaagaaacaggtacgttaatagttaatagcgtacttctttttcttgctttcgtggtattcttgctagttacactagccatccttactgcgcttcgattgtgtgcgtactgctgcaatattgttaacgtgagtttagtaaaaccaacggtttacgtctactcgcgtgttaaaaatctgaactcttctgaaggagttcctgatcttctggtctaaacgaactaactattattattattctgtttggaactttaacattgcttatcatggcagacaacggtactattaccgttgaggagcttaaacaactcctggaacaatggaacctagtaataggtttcctatgcctagcctggattatgttactacaatttgcctattctaatcggaacaggtttttgtacataataaagcttgttttcctctggctcttgtggccagtaacacttgcttgttttgtgcttgctgctgtctacagaattaattgggtgactggcgggattgcgattgcaatggcttgtattgtaggcttgatgtggcttagctacttcgttgcttccttcaggctgtttgctcgtacccgctcaatgtggtcattcaacccagaaacaaacattcttctcaatgtgcctctccgggggacaattgtgaccagaccgctcatggaaagtgaacttgtcattggtgctgtgatcattcgtggtcacttgcgaatggccggacactccctagggcgctgtgacattaaggacctgccaaaagagatcactgtggctacatcacgaacgctttcttattacaaattaggagcgtcgcagcgtgtaggcactgattcaggttttgctgcatacaaccgctaccgtattggaaactataaattaaatacagaccacgccggtagcaacgacaatattgctttgctagtacagtaagtgacaacagatgtttcatcttgttgacttccaggttacaatagcagagatattgattatcattatgaggactttcaggattgctatttggaatcttgacgttataataagttcaatagtgagacaattatttaagcctctaactaagaagaattattcggagttagatgatgaagaacctatggagttagattatccataaaacgaacatgaaaattattctcttcctgacattgattgtatttacatcttgcgagctatatcactatcaggagtgtgttagaggtacgactgtactactaaaagaaccttgcccatcaggaacatacgagggcaattcaccatttcaccctcttgctgacaataaatttgcactaacttgcactagcacacactttgcttttgcttgtgctgacggtactcgacatacctatcagctgcgtgcaagatcagtttcaccaaaacttttcatcagacaagaggaggttcaacaagagctctactcgccactttttctcattgttgctgctctagtatttttaatactttgcttcaccattaagagaaagacagaatgaatgagctcactttaattgacttctatttgtgctttttagcctttctgctattccttgttttaataatgcttattatattttggttttcactcgaaatccaggatctagaagaaccttgtaccaaagtctaaacgaacatgaaacttctcattgttttgacttgtatttctttatgcagttgcatatgcactgtagtacagcgctgtgcatctaataaacctcatgtgcttgaagatccttgtaaggtacaacactaggggtaatacttatagcactgcttggctttgtgctctaggaaaggttttaccttttcatagatggcacactatggttcaaacatgcacacctaatgttactatcaactgtcaagatccagctggtggtgcgcttatagctaggtgttggtaccttcatgaaggtcaccaaactgctgcatttagagacgtacttgttgttttaaataaacgaacaaattaaaatgtctgataatggaccccaatcaaaccaacgtagtgccccccgcattacatttggtggacccacagattcaactgacaataaccagaatggaggacgcaatggggcaaggccaaaacagcgccgaccccaaggtttacccaataatactgcgtcttggttcacagctctcactcagcatggtaaggaggaacttagattccctcgaggccagggcgttccaatcaacaccaatagtggtccagatgaccaaattggctactaccgaagagctacccgacgagttcgtggtggtgacggcaaaatgaaagagctcagccccagatggtacttctattacctaggaactggcccagaagcttcacttccctacggcgctaacaaagaaggcatcgtatgggttgcaactgagggagccttgaatacacccaaagaccacattggcacccgcaatcctaataacaatgctgccaccgtgctacaacttcctcaaggaacaacattgccaaaaggcttctacgcagagggaagcagaggcggcagtcaagcctcttctcgctcctcatcacgtagtcgcggtaattcaagaaattcaactcctggcagcagtaggggaaattctcctgctcgaatggctagcggaggtggtgaaactgccctcgcgctattgctgctagacagattgaaccagcttgagagcaaagtttctggtaaaggccaacaacaacaaggccaaactgtcactaagaaatctgctgctgaggcatctaaaaagcctcgccaaaaacgtactgccacaaaacagtacaacgtcactcaagcatttgggagacgtggtccagaacaaacccaaggaaatttcggggaccaagacctaatcagacaaggaactgattacaaacattggccgcaaattgcacaatttgctccaagtgcctctgcattctttggaatgtcacgcattggcatggaagtcacaccttcgggaacatggctgacttatcatggagccattaaattggatgacaaagatccacaattcaaagacaacgtcatactgctgaacaagcacattgacgcatacaaaacattcccaccaacagagcctaaaaaggacaaaaagaaaaagactgatgaagctcagcctttgccgcagagacaaaagaagcagcccactgtgactcttcttcctgcggctgacatggatgatttctccagacaacttcaaaattccatgagtggagcttctgctgattcaactcaggcataaacactcatgatgaccacacaaggcagatgggctatgtaaacgttttcgcaattccgtttacgatacatagtctactcttgtgcagaatgaattctcgtaactaaacagcacaagtaggtttagttaactttaatctcacatagcaatctttaatcaatgtgtaacattagggaggacttgaaagagccaccacattttcatcgaggccacgcggagtacgatcgagggtacagtgaataatgctagggagagctgcctatatggaagagccctaatgtgtaaaattaattttagtagtgctatccccatgtgattttaatagcttcttaggagaatgac

SEQ ID NO: 83 - DNA, 29727 bp, Coronavirus
atattaggtttttacctacccaggaaaagccaaccaacctcgatctcttgtagatctgttctctaaacgaactttaaaatctgtgtagctgtcgctcggctgcatgcctagtgcacctacgcagtataaacaataataaattttactgtcgttgacaagaaacgagtaactcgtccctcttctgcagactgcttacggtttcgtccgtgttgcagtcgatcatcagcatacctaggtttcgtccgggtgtgaccgaaaggtaagatggagagccttgttcttggtgtcaacgagaaaacacacgtccaactcagtttgcctgtccttcaggttagagacgtgctagtgcgtggcttcggggactctgtggaagaggccctatcggaggcacgtgaacacctcaaaaatggcacttgtggtctagtagagctggaaaaaggcgtactgccccagcttgaacagccctatgtgttcattaaacgttctgatgccttaagcaccaatcacggccacaaggtcgttgagctggttgcagaaatggacggcattcagtacggtcgtagcggtataacactgggagtactcgtgccacatgtgggcgaaaccccaattgcataccgcaatgttcttcttcgtaagaacggtaataagggagccggtggtcatagctatggcatcgatctaaagtcttatgacttaggtgacgagcttggcactgatcccattgaagattatgaacaaaactggaacactaagcatggcagtggtgcactccgtgaactcactcgtgagctcaatggaggtgcagtcactcgctatgtcgacaacaatttctgtggcccagatgggtaccctcttgattgcatcaaagattttctcgcacgcgcgggcaagtcaatgtgcactctttccgaacaacttgattacatcgagtcgaagagaggtgtctactgctgccgtgaccatgagcatgaaattgcctggttcactgagcgctctgataagagctacgagcaccagacacccttcgaaattaagagtgccaagaaatttgacactttcaaaggggaatgcccaaagtttgtgtttcctcttaactcaaaagtcaaagtcattcaaccacgtgttgaaaagaaaaagactgagggtttcatggggcgtatacgctctgtgtaccctgttgcatctccacaggagtgtaacaatatgcacttgtctaccttgatgaaatgtaatcattgcgatgaagtttcatggcagacgtgcgactttctgaaagccacttgtgaacattgtggcactgaaaatttagttattgaaggacctactacatgtgggtacctacctactaatgctgtagtgaaaatgccatgtcctgcctgtcaagacccagagattggacctgagcatagtgttgcagattatcacaaccactcaaacattgaaactcgactccgcaagggaggtaggactagatgttttggaggctgtgtgtttgcctatgttggctgctataataagcgtgcctactgggttcctcgtgctagtgctgatattggctcaggccatactggcattactggtgacaatgtggagaccttgaatgaggatctccttgagatactgagtcgtgaacgtgttaacattaacattgttggcgattttcatttgaatgaagaggttgccatcattttggcatctttctctgcttctacaagtgcctttattgacactataaagagtcttgattacaagtctttcaaaaccattgttgagtcctgcggtaactataaagttaccaagggaaagcccgtaaaaggtgcttggaacattggacaacagagatcagttttaacaccactgtgtggttttccctcacaggctgctggtgttatcagatcaatttttgcgcgcacacttgatgcagcaaaccactcaattcctgatttgcaaagagcagctgtcaccatacttgatggtatttctgaacagtcattacgtcttgtcgacgccatggtttatacttcagacctgctcaccaacagtgtcattattatggcatatgtaactggtggtcttgtacaacagacttctcagtggttgtctaatcttttgggcactactgttgaaaaactcaggcctatctttgaatggattgaggcgaaacttagtgcaggagttgaatttctcaaggatgcttgggagattctcaaatttctcattacaggtgtttttgacatcgtcaagggtcaaatacaggttgcttcagataacatcaaggattgtgtaaaatgcttcattgatgttgttaacaaggcactcgaaatgtgcattgatcaagtcactatcgctggcgcaaagttgcgatcactcaacttaggtgaagtcttcatcgctcaaagcaagggactttaccgtcagtgtatacgtggcaaggagcagctgcaactactcatgcctcttaaggcaccaaaagaagtaacctttcttgaaggtgattcacatgacacagtacttacctctgaggaggttgttctcaagaacggtgaactcgaagcactcgagacgcccgttgatagcttcacaaatggagctatcgttggcacaccagtctgtgtaaatggcctcatgctcttagagattaaggacaaagaacaatactgcgcattgtctcctggtttactggctacaaacaatgtctttcgcttaaaagggggtgcaccaattaaaggtgtaacctttggagaagatactgtttgggaagttcaaggttacaagaatgtgagaatcacatttgagcttgatgaacgtgttgacaaagtgcttaatgaaaagtgctctgtctacactgttgaatccggtaccgaagttactgagtttgcatgtgttgtagcagaggctgttgtgaagactttacaaccagtttctgatctccttaccaacatgggtattgatcttgatgagtggagtgtagctacattctacttatttgatgatgctggtgaagaaaacttttcatcacgtatgtattgttccttttaccctccagatgaggaagaagaggacgatgcagagtgtgaggaagaagaaattgatgaaacctgtgaacatgagtacggtacagaggatgattatcaaggtctccctctggaatttggtgcctcagctgaaacagttcgagttgaggaagaagaagaggaagactggctggatgatactactgagcaatcagagattgagccagaaccagaacctacacctgaagaaccagttaatcagtttactggttatttaaaacttactgacaatgttgccattaaatgtgttgacatcgttaaggaggcacaaagtgctaatcctatggtgattgtaaatgctgctaacatacacctgaaacatggtggtggtgtagcaggtgcactcaacaaggcaaccaatggtgccatgcaaaaggagagtgatgattacattaagctaaatggccctcttacagtaggagggtcttgtttgctttctggacataatcttgctaagaagtgtctgcatgttgttggacctaacctaaatgcaggtgaggacatccagcttcttaaggcagcatatgaaaatttcaattcacaggacatcttacttgcaccattgttgtcagcaggcatatttggtgctaaaccacttcagtctttacaagtgtgcgtgcagacggttcgtacacaggtttatattgcagtcaatgacaaagctctttatgagcaggttgtcatggattatcttgataacctgaagcctagagtggaagcacctaaacaagaggagccaccaaacacagaagattccaaaactgaggagaaatccgtcgtacagaagcctgtcgatgtgaagccaaaaattaaggcctgcattgatgaggttaccacaacactggaagaaactaagtttcttaccaataagttactcttgtttgctgatatcaatggtaagctttaccatgattctcagaacatgcttagaggtgaagatatgtctttccttgagaaggatgcaccttacatggtaggtgatgttatcactagtggtgatatcacttgtgttgtaataccctccaaaaaggctggtggcactactgagatgctctcaagagctttgaagaaagtgccagttgatgagtatataaccacgtaccctggacaaggatgtgctggttatacacttgaggaagctaagactgctcttaagaaatgcaaatctgcattttatgtactaccttcagaagcacctaatgctaaggaagagattctaggaactgtatcctggaatttgagagaaatgcttgctcatgctgaagagacaagaaaattaatgcctatatgcatggatgttagagccataatggcaaccatccaacgtaagtataaaggaattaaaattcaagagggcatcgttgactatggtgtccgattcttcttttatactagtaaagagcctgtagcttctattattacgaagctgaactctctaaatgagccgcttgtcacaatgccaattggttatgtgacacatggttttaatcttgaagaggctgcgcgctgtatgcgttctcttaaagctcctgccgtagtgtcagtatcatcaccagatgctgttactacatataatggatacctcacttcgtcatcaaagacatctgaggagcactttgtagaaacagtttctttggctggctcttacagagattggtcctattcaggacagcgtacagagttaggtgttgaatttcttaagcgtggtgacaaaattgtgtaccacactctggagagccccgtcgagtttcatcttgacggtgaggttctttcacttgacaaactaaagagtctcttatccctgcgggaggttaagactataaaagtgttcacaactgtggacaacactaatctccacacacagcttgtggatatgtctatgacatatggacagcagtttggtccaacatacttggatggtgctgatgttacaaaaattaaacctcatgtaaatcatgagggtaagactttctttgtactacctagtgatgacacactacgtagtgaagctttcgagtactaccatactcttgatgagagttttcttggtaggtacatgtctgctttaaaccacacaaagaaatggaaatttcctcaagttggtggtttaacttcaattaaatgggctgataacaattgttatttgtctagtgttttattagcacttcaacagcttgaagtcaaattcaatgcaccagcacttcaagaggcttattatagagcccgtgctggtgatgctgctaacttttgtgcactcatactcgcttacagtaataaaactgttggcgagcttggtgatgtcagagaaactatgacccatcttctacagcatgctaatttggaatctgcaaagcgagttcttaatgtggtgtgtaaacattgtggtcagaaaactactaccttaacgggtgtagaagctgtgatgtatatgggtactctatcttatgataatcttaagacaggtgtttccattccatgtgtgtgtggtcgtgatgctacacaatatctagtacaacaagagtcttcttttgttatgatgtctgcaccacctgctgagtataaattacagcaaggtacattcttatgtgcgaatgagtacactggtaactatcagtgtggtcattacactcatataactgctaaggagaccctctatcgtattgacggagctcaccttacaaagatgtcagagtacaaaggaccagtgactgatgttttctacaaggaaacatcttacactacaaccatcaagcctgtgtcgtataaactcgatggagttacttacacagagattgaaccaaaattggatgggtattataaaaaggataatgcttactatacagagcagcctatagaccttgtaccaactcaaccattaccaaatgcgagttttgataatttcaaactcacatgttctaacacaaaatttgctgatgatttaaatcaaatgacaggcttcacaaagccagcttcacgagagctatctgtcacattcttcccagacttgaatggcgatgtagtggctattgactatagacactattcagcgagtttcaagaaaggtgctaaattactgcataagccaattgtttggcacattaaccaggctacaaccaagacaacgttcaaaccaaacacttggtgtttacgttgtctttggagtacaaagccagtagatacttcaaattcatttgaagttctggcagtagaagacacacaaggaatggacaatcttgcttgtgaaagtcaacaacccacctctgaagaagtagtggaaaatcctaccatacagaaggaagtcatagagtgtgacgtgaaaactaccgaagttgtaggcaatgtcatacttaaaccatcagatgaaggtgttaaagtaacacaagagttaggtcatgaggatcttatggctgcttatgtggaaaacacaagcattaccattaagaaacctaatgagctttcactagccttaggtttaaaaacaattgccactcatggtattgctgcaattaatagtgttccttggagtaaaattttggcttatgtcaaaccattcttaggacaagcagcaattacaacatcaaattgcgctaagagattagcacaacgtgtgtttaacaattatatgccttatgtgtttacattattgttccaattgtgtacttttactaaaagtaccaattctagaattagagcttcactacctacaactattgctaaaaatagtgttaagagtgttgctaaattatgtttggatgccggcattaattatgtgaagtcacccaaattttctaaattgttcacaatcgctatgtggctattgttgttaagtatttgcttaggttctctaatctgtgtaactgctgcttttggtgtactcttatctaattttggtgctccttcttattgtaatggcgttagagaattgtatcttaattcgtctaacgttactactatggatttctgtgaaggttcttttccttgcagcatttgtttaagtggattagactcccttgattcttatccagctcttgaaaccattcaggtgacgatttcatcgtacaagctagacttgacaattttaggtctggccgctgagtgggttttggcatatatgttgttcacaaaattcttttatttattaggtctttcagctataatgcaggtgttctttggctattttgctagtcatttcatcagcaattcttggctcatgtggtttatcattagtattgtacaaatggcacccgtttctgcaatggttaggatgtacatcttctttgcttctttctactacatatggaagagctatgttcatatcatggatggttgcacctcttcgacttgcatgatgtgctataagcgcaatcgtgccacacgcgttgagtgtacaactattgttaatggcatgaagagatctttctatgtctatgcaaatggaggccgtggcttctgcaagactcacaattggaattgtctcaattgtgacacattttgcactggtagtacattcattagtgatgaagttgctcgtgatttgtcactccagtttaaaagaccaatcaaccctactgaccagtcatcgtatattgttgatagtgttgctgtgaaaaatggcgcgcttcacctctactttgacaaggctggtcaaaagacctatgagagacatccgctctcccattttgtcaatttagacaatttgagagctaacaacactaaaggttcactgcctattaatgtcatagtttttgatggcaagtccaaatgcgacgagtctgcttctaagtctgcttctgtgtactacagtcagctgatgtgccaacctattctgttgcttgaccaagctcttgtatcagacgttggagatagtactgaagtttccgttaagatgtttgatgcttatgtcgacaccttttcagcaacttttagtgttcctatggaaaaacttaaggcacttgttgctacagctcacagcgagttagcaaagggtgtagctttagatggtgtcctttctacattcgtgtcagctgcccgacaaggtgttgttgataccgatgttgacacaaaggatgttattgaatgtctcaaactttcacatcactctgacttagaagtgacaggtgacagttgtaacaatttcatgctcacctataataaggttgaaaacatgacgcccagagatcttggcgcatgtattgactgtaatgcaaggcatatcaatgcccaagtagcaaaaagtcacaatgtttcactcatctggaatgtaaaagactacatgtctttatctgaacagctgcgtaaacaaattcgtagtgctgccaagaagaacaacataccttttagactaacttgtgctacaactagacaggttgtcaatgtcataactactaaaatctcactcaagggtggtaagattgttagtacttgttttaaacttatgcttaaggccacattattgtgcgttcttgctgcattggtttgttatatcgttatgccagtacatacattgtcaatccatgatggttacacaaatgaaatcattggttacaaagccattcaggatggtgtcactcgtgacatcatttctactgatgattgttttgcaaataaacatgctggttttgacgcatggtttagccagcgtggtggttcatacaaaaatgacaaaagctgccctgtagtagctgctatcattacaagagagattggtttcatagtgcctggcttaccgggtactgtgctgagagcaatcaatggtgacttcttgcattttctacctcgtgtttttagtgctgttggcaacatttgctacacaccttccaaactcattgagtatagtgattttgctacctctgcttgcgttcttgctgctgagtgtacaatttttaaggatgctatgggcaaacctgtgccatattgttatgacactaatttgctagagggttctatttcttatagtgagcttcgtccagacactcgttatgtgcttatggatggttccatcatacagtttcctaacacttacctggagggttctgttagagtagtaacaacttttgatgctgagtactgtagacatggtacatgcgaaaggtcagaagtaggtatttgcctatctaccagtggtagatgggttcttaataatgagcattacagagctctatcaggagttttctgtggtgttgatgcgatgaatctcatagctaacatctttactcctcttgtgcaacctgtgggtgctttagatgtgtctgcttcagtagtggctggtggtattattgccatattggtgacttgtgctgcctactactttatgaaattcagacgtgtttttggtgagtacaaccatgttgttgctgctaatgcacttttgtttttgatgtctttcactatactctgtctggtaccagcttacagctttctgccgggagtctactcagtcttttacttgtacttgacattctatttcaccaatgatgtttcattcttggctcaccttcaatggtttgccatgttttctcctattgtgcctttttggataacagcaatctatgtattctgtatttctctgaagcactgccattggttctttaacaactatcttaggaaaagagtcatgtttaatggagttacatttagtaccttcgaggaggctgctttgtgtacctttttgctcaacaaggaaatgtacctaaaattgcgtagcgagacactgttgccacttacacagtataacaggtatcttgctctatataacaagtacaagtatttcagtggagccttagatactaccagctatcgtgaagcagcttgctgccacttagcaaaggctctaaatgactttagcaactcaggtgctgatgttctctaccaaccaccacagacatcaatcacttctgctgttctgcagagtggttttaggaaaatggcattcccgtcaggcaaagttgaagggtgcatggtacaagtaacctgtggaactacaactcttaatggattgtggttggatgacacagtatactgtccaagacatgtcatttgcacagcagaagacatgcttaatcctaactatgaagatctgctcattcgcaaatccaaccatagctttcttgttcaggctggcaatgttcaacttcgtgttattggccattctatgcaaaattgtctgcttaggcttaaagttgatacttctaaccctaagacacccaagtataaatttgtccgtatccaacctggtcaaacattttcagttctagcatgctacaatggttcaccatctggtgtttatcagtgtgccatgagacctaatcataccattaaaggttctttccttaatggatcatgtggtagtgttggttttaacattgattatgattgcgtgtctttctgctatatgcatcatatggagcttccaacaggagtacacgctggtactgacttagaaggtaaattctatggtccatttgttgacagacaaactgcacaggctgcaggtacagacacaaccataacattaaatgttttggcatggctgtatgctgctgttatcaatggtgataggtggtttcttaatagattcaccactactttgaatgactttaaccttgtggcaatgaagtacaactatgaacctttgacacaagatcatgttgacatattgggacctctttctgctcaaacaggaattgccgtcttagatatgtgtgctgctttgaaagagctgctgcagaatggtatgaatggtcgtactatccttggtagcactattttagaagatgagtttacaccatttgatgttgttagacaatgctctggtgttaccttccaaggtaagttcaagaaaattgttaagggcactcatcattggatgcttttaactttcttgacatcactattgattcttgttcaaagtacacagtggtcactgtttttctttgtttacgagaatgctttcttgccatttactcttggtattatggcaattgctgcatgtgctatgctgcttgttaagcataagcacgcattcttgtgcttgtttctgttaccttctcttgcaacagttgcttactttaatatggtctacatgcctgctagctgggtgatgcgtatcatgacatggcttgaattggctgacactagcttgtctggttataggcttaaggattgtgttatgtatgcttcagctttagttttgcttattctcatgacagctcgcactgtttatgatgatgctgctagacgtgtttggacactgatgaatgtcattacacttgtttacaaagtctactatggtaatgctttagatcaagctatttccatgtgggccttagttatttctgtaacctctaactattctggtgtcgttacgactatcatgtttttagctagagctatagtgtttgtgtgtgttgagtattatccattgttatttattactggcaacaccttacagtgtatcatgcttgtttattgtttcttaggctattgttgctgctgctactttggccttttctgtttactcaaccgttacttcaggcttactcttggtgtttatgactacttggtctctacacaagaatttaggtatatgaactcccaggggcttttgcctcctaagagtagtattgatgctttcaagcttaacattaagttgttgggtattggaggtaaaccatgtatcaaggttgctactgtacagtctaaaatgtctgacgtaaagtgcacatctgtggtactgctctcggttcttcaacaacttagagtagagtcatcttctaaattgtgggcacaatgtgtacaactccacaatgatattcttcttgcaaaagacacaactgaagctttcgagaagatggtttctcttttgtctgttttgctatccatgcagggtgctgtagacattaataggttgtgcgaggaaatgctcgataaccgtgctactcttcaggctattgcttcagaatttagttctttaccatcatatgccgcttatgccactgcccaggaggcctatgagcaggctgtagctaatggtgattctgaagtcgttctcaaaaagttaaagaaatctttgaatgtggctaaatctgagtttgaccgtgatgctgccatgcaacgcaagttggaaaagatggcagatcaggctatgacccaaatgtacaaacaggcaagatctgaggacaagagggcaaaagtaactagtgctatgcaaacaatgctcttcactatgcttaggaagcttgataatgatgcacttaacaacattatcaacaatgcgcgtgatggttgtgttccactcaacatcataccattgactacagcagccaaactcatggttgttgtccctgattatggtacctacaagaacacttgtgatggtaacacctttacatatgcatctgcactctgggaaatccagcaagttgttgatgcggatagcaagattgttcaacttagtgaaattaacatggacaattcaccaaatttggcttggcctcttattgttacagctctaagagccaactcagctgttaaactacagaataatgaactgagtccagtagcactacgacagatgtcctgtgcggctggtaccacacaaacagcttgtactgatgacaatgcacttgcctactataacaattcgaagggaggtaggtttgtgctggcattactatcagaccaccaagatctcaaatgggctagattccctaagagtgatggtacaggtacaatttacacagaactggaaccaccttgtaggtttgttacagacacaccaaaagggcctaaagtgaaatacttgtacttcatcaaaggcttaaacaacctaaatagaggtatggtgctgggcagtttagctgctacagtacgtcttcaggctggaaatgctacagaagtacctgccaattcaactgtgctttccttctgtgcttttgcagtagaccctgctaaagcatataaggattacctagcaagtggaggacaaccaatcaccaactgtgtgaagatgttgtgtacacacactggtacaggacaggcaattactgtaacaccagaagctaacatggaccaagagtcctttggtggtgcttcatgttgtctgtattgtagatgccacattgaccatccaaatcctaaaggattctgtgacttgaaaggtaagtacgtccaaatacctaccacttgtgctaatgacccagtgggttttacacttagaaacacagtctgtaccgtctgcggaatgtggaaaggttatggctgtagttgtgaccaactccgcgaacccttgatgcagtctgcggatgcatcaacgtttttaaacgggtttgcggtgtaagtgcagcccgtcttacaccgtgcggcacaggcactagtactgatgtcgtctacagggcttttgatatttacaacgaaaaagttgctggttttgcaaagttcctaaaaactaattgctgtcgcttccaggagaaggatgaggaaggcaatttattagactcttactttgtagttaagaggcatactatgtctaactaccaacatgaagagactatttataacttggttaaagattgtccagcggttgctgtccatgactttttcaagtttagagtagatggtgacatggtaccacatatatcacgtcagcgtctaactaaatacacaatggctgatttagtctatgctctacgtcattttgatgagggtaattgtgatacattaaaagaaatactcgtcacatacaattgctgtgatgatgattatttcaataagaaggattggtatgacttcgtagagaatcctgacatcttacgcgtatatgctaacttaggtgagcgtgtacgccaatcattattaaagactgtacaattctgcgatgctatgcgtgatgcaggcattgtaggcgtactgacattagataatcaggatcttaatgggaactggtacgatttcggtgatttcgtacaagtagcaccaggctgcggagttcctattgtggattcatattactcattgctgatgcccatcctcactttgactagggcattggctgctgagtcccatatggatgctgatctcgcaaaaccacttattaagtgggatttgctgaaatatgattttacggaagagagactttgtctcttcgaccgttattttaaatattgggaccagacataccatcccaattgtattaactgtttggatgataggtgtatccttcattgtgcaaactttaatgtgttattttctactgtgtttccacctacaagttttggaccactagtaagaaaaatatttgtagatggtgttccttttgttgtttcaactggataccattttcgtgagttaggagtcgtacataatcaggatgtaaacttacatagctcgcgtctcagtttcaaggaacttttagtgtatgctgctgatccagctatgcatgcagcttctggcaatttattgctagataaacgcactacatgcttttcagtagctgcactaacaaacaatgttgcttttcaaactgtcaaacccggtaattttaataaagacttttatgactttgctgtgtctaaaggtttctttaaggaaggaagttctgttgaactaaaacacttcttctttgctcaggatggcaacgctgctatcagtgattatgactattatcgttataatctgccaacaatgtgtgatatcagacaactcctattcgtagttgaagttgttgataaatactttgattgttacgatggtggctgtattaatgccaaccaagtaatcgttaacaatctggataaatcagctggtttcccatttaataaatggggtaaggctagactttattatgactcaatgagttatgaggatcaagatgcacttttcgcgtatactaagcgtaatgtcatccctactataactcaaatgaatcttaagtatgccattagtgcaaagaatagagctcgcaccgtagctggtgtctctatctgtagtactatgacaaatagacagtttcatcagaaattattgaagtcaatagccgccactagaggagctactgtggtaattggaacaagcaagttttacggtggctggcataatatgttaaaaactgtttacagtgatgtagaaactccacaccttatgggttgggattatccaaaatgtgacagagccatgcctaacatgcttaggataatggcctctcttgttcttgctcgcaaacataacacttgctgtaacttatcacaccgtttctacaggttagctaacgagtgtgcgcaagtattaagtgagatggtcatgtgtggcggctcactatatgttaaaccaggtggaacatcatccggtgatgctacaactgcttatgctaatagtgtctttaacatttgtcaagctgttacagccaatgtaaatgcacttctttcaactgatggtaataagatagctgacaagtatgtccgcaatctacaacacaggctctatgagtgtctctatagaaatagggatgttgatcatgaattcgtggatgagttttacgcttacctgcgtaaacatttctccatgatgattctttctgatgatgccgttgtgtgctataacagtaactatgcggctcaaggtttagtagctagcattaagaactttaaggcagttctttattatcaaaataatgtgttcatgtctgaggcaaaatgttggactgagactgaccttactaaaggacctcacgaattttgctcacagcatacaatgctagttaaacaaggagatgattacgtgtacctgccttacccagatccatcaagaatattaggcgcaggctgttttgtcgatgatattgtcaaaacagatggtacacttatgattgaaaggttcgtgtcactggctattgatgcttacccacttacaaaacatcctaatcaggagtatgctgatgtctttcacttgtatttacaatacattagaaagttacatgatgagcttactggccacatgttggacatgtattccgtaatgctaactaatgataacacctcacggtactgggaacctgagttttatgaggctatgtacacaccacatacagtcttgcaggctgtaggtgcttgtgtattgtgcaattcacagacttcacttcgttgcggtgcctgtattaggagaccattcctatgttgcaagtgctgctatgaccatgtcatttcaacatcacacaaattagtgttgtctgttaatccctatgtttgcaatgccccaggttgtgatgtcactgatgtgacacaactgtatctaggaggtatgagctattattgcaagtcacataagcctcccattagttttccattatgtgctaatggtcaggtttttggtttatacaaaaacacatgtgtaggcagtgacaatgtcactgacttcaatgcgatagcaacatgtgattggactaatgctggcgattacatacttgccaacacttgtactgagagactcaagcttttcgcagcagaaacgctcaaagccactgaggaaacatttaagctgtcatatggtattgccactgtacgcgaagtactctctgacagagaattgcatctttcatgggaggttggaaaacctagaccaccattgaacagaaactatgtctttactggttaccgtgtaactaaaaatagtaaagtacagattggagagtacacctttgaaaaaggtgactatggtgatgctgttgtgtacagaggtactacgacatacaagttgaatgttggtgattactttgtgttgacatctcacactgtaatgccacttagtgcacctactctagtgccacaagagcactatgtgagaattactggcttgtacccaacactcaacatctcagatgagttttctagcaatgttgcaaattatcaaaaggtcggcatgcaaaagtactctacactccaaggaccacctggtactggtaagagtcattttgccatcggacttgctctctattacccatctgctcgcatagtgtatacggcatgctctcatgcagctgttgatgccctatgtgaaaaggcattaaaatatttgcccatagataaatgtagtagaatcatacctgcgcgtgcgcgcgtagagtgttttgataaattcaaagtgaattcaacactagaacagtatgttttctgcactgtaaatgcattgccagaaacaactgctgacattgtagtctttgatgaaatctctatggctactaattatgacttgagtgttgtcaatgctagacttcgtgcaaaacactacgtctatattggcgatcctgctcaattaccagccccccgcacattgctgactaaaggcacactagaaccagaatattttaattcagtgtgcagacttatgaaaacaataggtccagacatgttccttggaacttgtcgccgttgtcctgctgaaattgttgacactgtgagtgctttagtttatgacaataagctaaaagcacacaaggataagtcagctcaatgcttcaaaatgttctacaaaggtgttattacacatgatgtttcatctgcaatcaacagacctcaaataggcgttgtaagagaatttcttacacgcaatcctgcttggagaaaagctgtttttatctcaccttataattcacagaacgctgtagcttcaaaaatcttaggattgcctacgcagactgttgattcatcacagggttctgaatatgactatgtcatattcacacaaactactgaaacagcacactcttgtaatgtcaaccgcttcaatgtggctatcacaagggcaaaaattggcattttgtgcataatgtctgatagagatctttatgacaaactgcaatttacaagtctagaaataccacgtcgcaatgtggctacattacaagcagaaaatgtaactggactttttaaggactgtagtaagatcattactggtcttcatcctacacaggcacctacacacctcagcgttgatataaagttcaagactgaaggattatgtgttgacataccaggcataccaaaggacatgacctaccgtagactcatctctatgatgggtttcaaaatgaattaccaagtcaatggttaccctaatatgtttatcacccgcgaagaagctattcgtcacgttcgtgcgtggattggctttgatgtagagggctgtcatgcaactagagatgctgtgggtactaacctacctctccagctaggattttctacaggtgttaacttagtagctgtaccgactggttatgttgacactgaaaataacacagaattcaccagagttaatgcaaaacctccaccaggtgaccagtttaaacatcttataccactcatgtataaaggcttgccctggaatgtagtgcgtattaagatagtacaaatgctcagtgatacactgaaaggattgtcagacagagtcgtgttcgtcctttgggcgcatggctttgagcttacatcaatgaagtactttgtcaagattggacctgaaagaacgtgttgtctgtgtgacaaacgtgcaacttgcttttctacttcatcagatacttatgcctgctggaatcattctgtgggttttgactatgtctataacccatttatgattgatgttcagcagtggggctttacgggtaaccttcagagtaaccatgaccaacattgccaggtacatggaaatgcacatgtggctagttgtgatgctatcatgactagatgtttagcagtccatgagtgctttgttaagcgcgttgattggtctgttgaataccctattataggagatgaactgagggttaattctgcttgcagaaaagtacaacacatggttgtgaagtctgcattgcttgctgataagtttccagttcttcatgacattggaaatccaaaggctatcaagtgtgtgcctcaggctgaagtagaatggaagttctacgatgctcagccatgtagtgacaaagcttacaaaatagaggaactcttctattcttatgctacacatcacgataaattcactgatggtgtttgtttgttttggaattgtaacgttgatcgttacccagccaatgcaattgtgtgtaggtttgacacaagagtcttgtcaaacttgaacttaccaggctgtgatggtggtagtttgtatgtgaataagcatgcattccacactccagctttcgataaaagtgcatttactaatttaaagcaattgcctttcttttactattctgatagtccttgtgagtctcatggcaaacaagtagtgtcggatattgattatgttccactcaaatctgctacgtgtattacacgatgcaatttaggtggtgctgtttgcagacaccatgcaaatgagtaccgacagtacttggatgcatataatatgatgatttctgctggatttagcctatggatttacaaacaatttgatacttataacctgtggaatacatttaccaggttacagagtttagaaaatgtggcttataatgttgttaataaaggacactttgatggacacgccggcgaagcacctgtttccatcattaataatgctgtttacacaaaggtagatggtattgatgtggagatctttgaaaataagacaacacttcctgttaatgttgcatttgagctttgggctaagcgtaacattaaaccagtgccagagattaagatactcaataatttgggtgttgatatcgctgctaatactgtaatctgggactacaaaagagaagccccagcacatgtatctacaataggtgtctgcacaatgactgacattgccaagaaacctactgagagtgcttgttcttcacttactgtcttgtttgatggtagagtggaaggacaggtagacctttttagaaacgcccgtaatggtgttttaataacagaaggttcagtcaaaggtctaacaccttcaaagggaccagcacaagctagcgtcaatggagtcacattaattggagaatcagtaaaaacacagtttaactactttaagaaagtagacggcattattcaacagttgcctgaaacctactttactcagagcagagacttagaggattttaagcccagatcacaaatggaaactgactttctcgagctcgctatggatgaattcatacagcgatataagctcgagggctatgccttcgaacacatcgtttatggagatttcagtcatggacaacttggcggtcttcatttaatgataggcttagccaagcgctcacaagattcaccacttaaattagaggattttatccctatggacagcacagtgaaaaattacttcataacagatgcgcaaacaggttcatcaaaatgtgtgtgttctgtgattgatcttttacttgatgactttgtcgagataataaagtcacaagatttgtcagtgatttcaaaagtggtcaaggttacaattgactatgctgaaatttcattcatgctttggtgtaaggatggacatgttgaaaccttctacccaaaactacaagcaagtcaagcgtggcaaccaggtgttgcgatgcctaacttgtacaagatgcaaagaatgcttcttgaaaagtgtgaccttcagaattatggtgaaaatgctgttataccaaaaggaataatgatgaatgtcgcaaagtatactcaactgtgtcaatacttaaatacacttactttagctgtaccctacaacatgagagttattcactttggtgctggctctgataaaggagttgcaccaggtacagctgtgctcagacaatggttgccaactggcacactacttgtcgattcagatcttaatgacttcgtctccgacgcagattctactttaattggagactgtgcaacagtacatacggctaataaatgggaccttattattagcgatatgtatgaccctaggaccaaacatgtgacaaaagagaatgactctaaagaagggtttttcacttatctgtgtggatttataaagcaaaaactagccctgggtggttctatagctgtaaagataacagagcattcttggaatgctgacctttacaagcttatgggccatttctcatggtggacagcttttgttacaaatgtaaatgcatcatcatcggaagcatttttaattggggctaactatcttggcaagccgaaggaacaaattgatggctataccatgcatgctaactacattttctggaggaacacaaatcctatccagttgtcttcctattcactctttgacatgagcaaatttcctcttaaattaagaggaactgctgtaatgtctcttaaggagaatcaaatcaatgatatgatttattctcttctggaaaaaggtaggcttatcattagagaaaacaacagagttgtggtttcaagtgatattcttgttaacaactaaacgaacatgtttattttcttattatttcttactctcactagtggtagtgaccttgaccggtgcaccacttttgatgatgttcaagctcctaattatactcaacatacttcatctatgaggggggtttactatcctgatgaaatttttagatcagacactctttatttaactcaggatttatttcttccattttattctaatgttacagggtttcatactattaatcatacgtttggcaaccctgtcataccttttaaggatggtatttattttgctgccacagagaaatcaaatgttgtccgtggttgggtttttggttctaccatgaacaacaagtcacagtcggtgattattattaacaattctactaatgttgttatacgagcatgtaactttgaattgtgtgacaaccctttctttgctgtttctaaacccatgggtacacagacacatactatgatattcgataatgcatttaattgcactttcgagtacatatctgatgccttttcgcttgatgtttcagaaaagtcaggtaattttaaacacttacgagagtttgtgtttaaaaataaagatgggtttctctatgtttataagggctatcaacctatagatgtagttcgtgatctaccttctggttttaacactttgaaacctatttttaagttgcctcttggtattaacattacaaattttagagccattcttacagccttttcacctgctcaagacatttggggcacgtcagctgcagcctattttgttggctatttaaagccaactacatttatgctcaagtatgatgaaaatggtacaatcacagatgctgttgattgttctcaaaatccacttgctgaactcaaatgctctgttaagagctttgagattgacaaaggaatttaccagacctctaatttcagggttgttccctcaggagatgttgtgagattccctaatattacaaacttgtgtccttttggagaggtttttaatgctactaaattcccttctgtctatgcatgggagagaaaaaaaatttctaattgtgttgctgattactctgtgctctacaactcaacatttttttcaacctttaagtgctatggcgtttctgccactaagttgaatgatctttgcttctccaatgtctatgcagattcttttgtagtcaagggagatgatgtaagacaaatagcgccaggacaaactggtgttattgctgattataattataaattgccagatgatttcatgggttgtgtccttgcttggaatactaggaacattgatgctacttcaactggtaattataattataaatataggtatcttagacatggcaagcttaggccctttgagagagacatatctaatgtgcctttctcccctgatggcaaaccttgcaccccacctgctcttaattgttattggccattaaatgattatggtttttacaccactactggcattggctaccaaccttacagagttgtagtactttcttttgaacttttaaatgcaccggccacggtttgtggaccaaaattatccactgaccttattaagaaccagtgtgtcaattttaattttaatggactcactggtactggtgtgttaactccttcttcaaagagatttcaaccatttcaacaatttggccgtgatgtttctgatttcactgattccgttcgagatcctaaaacatctgaaatattagacatttcaccttgctcttttgggggtgtaagtgtaattacacctggaacaaatgcttcatctgaagttgctgttctatatcaagatgttaactgcactgatgtttctacagcaattcatgcagatcaactcacaccagcttggcgcatatattctactggaaacaatgtattccagactcaagcaggctgtcttataggagctgagcatgtcgacacttcttatgagtgcgacattcctattggagctggcatttgtgctagttaccatacagtttctttattacgtagtactagccaaaaatctattgtggcttatactatgtctttaggtgctgatagttcaattgcttactctaataacaccattgctatacctactaacttttcaattagcattactacagaagtaatgcctgtttctatggctaaaacctccgtagattgtaatatgtacatctgcggagattctactgaatgtgctaatttgcttctccaatatggtagcttttgcacacaactaaatcgtgcactctcaggtattgctgctgaacaggatcgcaacacacgtgaagtgttcgctcaagtcaaacaaatgtacaaaaccccaactttgaaatattttggtggttttaatttttcacaaatattacctgaccctctaaagccaactaagaggtcttttattgaggacttgctctttaataaggtgacactcgctgatgctggcttcatgaagcaatatggcgaatgcctaggtgatattaatgctagagatctcatttgtgcgcagaagttcaatggacttacagtgttgccacctctgctcactgatgatatgattgctgcctacactgctgctctagttagtggtactgccactgctggatggacatttggtgctggcgctgctcttcaaataccttttgctatgcaaatggcatataggttcaatggcattggagttacccaaaatgttctctatgagaaccaaaaacaaatcgccaaccaatttaacaaggcgattagtcaaattcaagaatcacttacaacaacatcaactgcattgggcaagctgcaagacgttgttaaccagaatgctcaagcattaaacacacttgttaaacaacttagctctaattttggtgcaatttcaagtgtgctaaatgatatcctttcgcgacttgataaagtcgaggcggaggtacaaattgacaggttaattacaggcagacttcaaagccttcaaacctatgtaacacaacaactaatcagggctgctgaaatcagggcttctgctaatcttgctgctactaaaatgtctgagtgtgttcttggacaatcaaaaagagttgacttttgtggaaagggctaccaccttatgtccttcccacaagcagccccgcatggtgttgtcttcctacatgtcacgtatgtgccatcccaggagaggaacttcaccacagcgccagcaatttgtcatgaaggcaaagcatacttccctcgtgaaggtgtttttgtgtttaatggcacttcttggtttattacacagaggaacttcttttctccacaaataattactacagacaatacatttgtctcaggaaattgtgatgtcgttattggcatcattaacaacacagtttatgatcctctgcaacctgagcttgactcattcaaagaagagctggacaagtacttcaaaaatcatacatcaccagatgttgatcttggcgacatttcaggcattaacgcttctgtcgtcaacattcaaaaagaaattgaccgcctcaatgaggtcgctaaaaatttaaatgaatcactcattgaccttcaagaattgggaaaatatgagcaatatattaaatggccttggtatgtttggctcggcttcattgctggactaattgccatcgtcatggttacaatcttgctttgttgcatgactagttgttgcagttgcctcaagggtgcatgctcttgtggttcttgctgcaagtttgatgaggatgactctgagccagttctcaagggtgtcaaattacattacacataaacgaacttatggatttgtttatgagattttttactcttggatcaattactgcacagccagtaaaaattgacaatgcttctcctgcaagtactgttcatgctacagcaacgataccgctacaagcctcactccctttcggatggcttgttattggcgttgcatttcttgctgtttttcagagcgctaccaaaataattgcgctcaataaaagatggcagctagccctttataagggcttccagttcatttgcaatttactgctgctatttgttaccatctattcacatcttttgcttgtcgctgcaggtatggaggcgcaatttttgtacctctatgccttgatatattttctacaatgcatcaacgcatgtagaattattatgagatgttggctttgttggaagtgcaaatccaagaacccattactttatgatgccaactactttgtttgctggcacacacataactatgactactgtataccatataacagtgtcacagatacaattgtcgttactgaaggtgacggcatttcaacaccaaaactcaaagaagactaccaaattggtggttattctgaggataggcactcaggtgttaaagactatgtcgttgtacatggctatttcaccgaagtttactaccagcttgagtctacacaaattactacagacactggtattgaaaatgctacattcttcatctttaacaagcttgttaaagacccaccgaatgtgcaaatacacacaatcgacggctcttcaggagttgctaatccagcaatggatccaatttatgatgagccgacgacgactactagcgtgcctttgtaagcacaagaaagtgagtacgaacttatgtactcattcgtttcggaagaaacaggtacgttaatagttaatagcgtacttctttttcttgctttcgtggtattcttgctagttacactagccatccttactgcgcttcgattgtgtgcgtactgctgcaatattgttaacgtgagtttagtaaaaccaacggtttacgtctactcgcgtgttaaaaatctgaactcttctgaaggagttcctgatcttctggtctaaacgaactaactattattattattctgtttggaactttaacattgcttatcatggcagacaacggtactattaccgttgaggagcttaaacaactcctggaacaatggaacctagtaataggtttcctatgcctagcctggattatgttactacaatttgcctattctaatcggaacaggtttttgtacataataaagcttgttttcctctggctcttgtggccagtaacacttgcttgttttgtgcttgctgctgtctacagaattaattgggtgactggcgggattgcgattgcaatggcttgtattgtaggcttgatgtggcttagctacttcgttgcttccttcaggctgtttgctcgtacccgctcaatgtggtcattcaacccagaaacaaacattcttctcaatgtgcctctccgggggacaattgtgaccagaccgctcatggaaagtgaacttgtcattggtgctgtgatcattcgtggtcacttgcgaatggccggacactccctagggcgctgtgacattaaggacctgccaaaagagatcactgtggctacatcacgaacgctttcttattacaaattaggagcgtcgcagcgtgtaggcactgattcaggttttgctgcatacaaccgctaccgtattggaaactataaattaaatacagaccacgccggtagcaacgacaatattgctttgctagtacagtaagtgacaacagatgtttcatcttgttgacttccaggttacaatagcagagatattgattatcattatgaggactttcaggattgctatttggaatcttgacgttataataagttcaatagtgagacaattatttaagcctctaactaagaagaattattcggagttagatgatgaagaacctatggagttagattatccataaaacgaacatgaaaattattctcttcctgacattgattgtatttacatcttgcgagctatatcactatcaggagtgtgttagaggtacgactgtactactaaaagaaccttgcccatcaggaacatacgagggcaattcaccatttcaccctcttgctgacaataaatttgcactaacttgcactagcacacactttgcttttgcttgtgctgacggtactcgacatacctatcagctgcgtgcaagatcagtttcaccaaaacttttcatcagacaagaggaggttcaacaagagctctactcgccactttttctcattgttgctgctctagtatttttaatactttgcttcaccattaagagaaagacagaatgaatgagctcactttaattgacttctatttgtgctttttagcctttctgctattccttgttttaataatgcttattatattttggttttcactcgaaatccaggatctagaagaaccttgtaccaaagtctaaacgaacatgaaacttctcattgttttgacttgtatttctttatgcagttgcatatgcactgtagtacagcgctgtgcatctaataaacctcatgtgcttgaagatccttgtaaggtacaacactaggggtaatacttatagcactgcttggctttgtgctctaggaaaggttttaccttttcatagatggcacactatggttcaaacatgcacacctaatgttactatcaactgtcaagatccagctggtggtgcgcttatagctaggtgttggtaccttcatgaaggtcaccaaactgctgcatttagagacgtacttgttgttttaaataaacgaacaaattaaaatgtctgataatggaccccaatcaaaccaacgtagtgccccccgcattacatttggtggacccacagattcaactgacaataaccagaatggaggacgcaatggggcaaggccaaaacagcgccgaccccaaggtttacccaataatactgcgtcttggttcacagctctcactcagcatggcaaggaggaacttagattccctcgaggccagggcgttccaatcaacaccaatagtggtccagatgaccaaattggctactaccgaagagctacccgacgagttcgtggtggtgacggcaaaatgaaagagctcagccccagatggtacttctattacctaggaactggcccagaagcttcacttccctacggcgctaacaaagaaggcatcgtatgggttgcaactgagggagccttgaatacacccaaagaccacattggcacccgcaatcctaataacaatgctgccaccgtgctacaacttcctcaaggaacaacattgccaaaaggcttctacgcagagggaagcagaggcggcagtcaagcctcttctcgctcctcatcacgtagtcgcggtaattcaagaaattcaactcctggcagcagtaggggaaattctcctgctcgaatggctagcggaggtggtgaaactgccctcgcgctattgctgctagacagattgaaccagcttgagagcaaagtttctggtaaaggccaacaacaacaaggccaaactgtcactaagaaatctgctgctgaggcatctaaaaagcctcgccaaaaacgtactgccacaaaacagtacaacgtcactcaagcatttgggagacgtggtccagaacaaacccaaggaaatttcggggaccaagacctaatcagacaaggaactgattacaaacattggccgcaaattgcacaatttgctccaagtgcctctgcattctttggaatgtcacgcattggcatggaagtcacaccttcgggaacatggctgacttatcatggagccattaaattggatgacaaagatccacaattcaaagacaacgtcatactgctgaacaagcacattgacgcatacaaaacattcccaccaacagagcctaaaaaggacaaaaagaaaaagactgatgaagctcagcctttgccgcagagacaaaagaagcagcccactgtgactcttcttcctgcggctgacatggatgatttctccagacaacttcaaaattccatgagtggagcttctgctgattcaactcaggcataaacactcatgatgaccacacaaggcagatgggctatgtaaacgttttcgcaattccgtttacgatacatagtctactcttgtgcagaatgaattctcgtaactaaacagcacaagtaggtttagttaactttaatctcacatagcaatctttaatcaatgtgtaacattagggaggacttgaaagagccaccacattttcatcgaggccacgcggagtacgatcgagggtacagtgaataatgctagggagagctgcctatatggaagagccctaatgtgtaaaattaattttagtagtgctatccccatgtgattttaatagcttcttaggagaatgac

SEQ ID NO: 84 - DNA, 29727 bp, Coronavirus
atattaggtttttacctacccaggaaaagccaaccaacctcgatctcttgtagatctgttctctaaacgaactttaaaatctgtgtagctgtcgctcggctgcatgcctagtgcacctacgcagtataaacaataataaattttactgtcgttgacaagaaacgagtaactcgtccctcttctgcagactgcttacggtttcgtccgtgttgcagtcgatcatcagcatacctaggtttcgtccgggtgtgaccgaaaggtaagatggagagccttgttcttggtgtcaacgagaaaacacacgtccaactcagtttgcctgtccttcaggttagagacgtgctagtgcgtggcttcggggactctgtggaagaggccctatcggaggcacgtgaacacctcaaaaatggcacttgtggtctagtagagctggaaaaaggcgtactgccccagcttgaacagccctatgtgttcattaaacgttctgatgccttaagcaccaatcacggccacaaggtcgttgagctggttgcagaaatggacggcattcagtacggtcgtagcggtataacactgggagtactcgtgccacatgtgggcgaaaccccaattgcataccgcaatgttcttcttcgtaagaacggtaataagggagccggtggtcatagctatggcatcgatctaaagtcttatgacttaggtgacgagcttggcactgatcccattgaagattatgaacaaaactggaacactaagcatggcagtggtgcactccgtgaactcactcgtgagctcaatggaggtgcagtcactcgctatgtcgacaacaatttctgtggcccagatgggtaccctcttgattgcatcaaagattttctcgcacgcgcgggcaagtcaatgtgcactctttccgaacaacttgattacatcgagtcgaagagaggtgtctactgctgccgtgaccatgagcatgaaattgcctggttcactgagcgctctgataagagctacgagcaccagacacccttcgaaattaagagtgccaagaaatttgacactttcaaaggggaatgcccaaagtttgtgtttcctcttaactcaaaagtcaaagtcattcaaccacgtgttgaaaagaaaaagactgagggtttcatggggcgtatacgctctgtgtaccctgttgcatctccacaggagtgtaacaatatgcacttgtctaccttgatgaaatgtaatcattgcgatgaagtttcatggcagacgtgcgactttctgaaagccacttgtgaacattgtggcactgaaaatttagttattgaaggacctactacatgtgggtacctacctactaatgctgtagtgaaaatgccatgtcctgcctgtcaagacccagagattggacctgagcatagtgttgcagattatcacaaccactcaaacattgaaactcgactccgcaagggaggtaggactagatgttttggaggctgtgtgtttgcctatgttggctgctataataagcgtgcctactgggttcctcgtgctagtgctgatattggctcaggccatactggcattactggtgacaatgtggagaccttgaatgaggatctccttgagatactgagtcgtgaacgtgttaacattaacattgttggcgattttcatttgaatgaagaggttgccatcattttggcatctttctctgcttctacaagtgcctttattgacactataaagagtcttgattacaagtctttcaaaaccattgttgagtcctgcggtaactataaagttaccaagggaaagcccgtaaaaggtgcttggaacattggacaacagagatcagttttaacaccactgtgtggttttccctcacaggctgctggtgttatcagatcaatttttgcgcgcacacttgatgcagcaaaccactcaattcctgatttgcaaagagcagctgtcaccatacttgatggtatttctgaacagtcattacgtcttgtcgacgccatggtttatacttcagacctgctcaccaacagtgtcattattatggcatatgtaactggtggtcttgtacaacagacttctcagtggttgtctaatcttttgggcactactgttgaaaaactcaggcctatctttgaatggattgaggcgaaacttagtgcaggagttgaatttctcaaggatgcttgggagattctcaaatttctcattacaggtgtttttgacatcgtcaagggtcaaatacaggttgcttcagataacatcaaggattgtgtaaaatgcttcattgatgttgttaacaaggcactcgaaatgtgcattgatcaagtcactatcgctggcgcaaagttgcgatcactcaacttaggtgaagtcttcatcgctcaaagcaagggactttaccgtcagtgtatacgtggcaaggagcagctgcaactactcatgcctcttaaggcaccaaaagaagtaacctttcttgaaggtgattcacatgacacagtacttacctctgaggaggttgttctcaagaacggtgaactcgaagcactcgagacgcccgttgatagcttcacaaatggagctatcgttggcacaccagtctgtgtaaatggcctcatgctcttagagattaaggacaaagaacaatactgcgcattgtctcctggtttactggctacaaacaatgtctttcgcttaaaagggggtgcaccaattaaaggtgtaacctttggagaagatactgtttgggaagttcaaggttacaagaatgtgagaatcacatttgagcttgatgaacgtgttgacaaagtgcttaatgaaaagtgctctgtctacactgttgaatccggtaccgaagttactgagtttgcatgtgttgtagcagaggctgttgtgaagactttacaaccagtttctgatctccttaccaacatgggtattgatcttgatgagtggagtgtagctacattctacttatttgatgatgctggtgaagaaaacttttcatcacgtatgtattgttccttttaccctccagatgaggaagaagaggacgatgcagagtgtgaggaagaagaaattgatgaaacctgtgaacatgagtacggtacagaggatgattatcaaggtctccctctggaatttggtgcctcagctgaaacagttcgagttgaggaagaagaagaggaagactggctggatgatactactgagcaatcagagattgagccagaaccagaacctacacctgaagaaccagttaatcagtttactggttatttaaaacttactgacaatgttgccattaaatgtgttgacatcgttaaggaggcacaaagtgctaatcctatggtgattgtaaatgctgctaacatacacctgaaacatggtggtggtgtagcaggtgcactcaacaaggcaaccaatggtgccatgcaaaaggagagtgatgattacattaagctaaatggccctcttacagtaggagggtcttgtttgctttctggacataatcttgctaagaagtgtctgcatgttgttggacctaacctaaatgcaggtgaggacatccagcttcttaaggcagcatatgaaaatttcaattcacaggacatcttacttgcaccattgttgtcagcaggcatatttggtgctaaaccacttcagtctttacaagtgtgcgtgcagacggttcgtacacaggtttatattgcagtcaatgacaaagctctttatgagcaggttgtcatggattatcttgataacctgaagcctagagtggaagcacctaaacaagaggagccaccaaacacagaagattccaaaactgaggagaaatccgtcgtacagaagcctgtcgatgtgaagccaaaaattaaggcctgcattgatgaggttaccacaacactggaagaaactaagtttcttaccaataagttactcttgtttgctgatatcaatggtaagctttaccatgattctcagaacatgcttagaggtgaagatatgtctttccttgagaaggatgcaccttacatggtaggtgatgttatcactagtggtgatatcacttgtgttgtaataccctccaaaaaggctggtggcactactgagatgctctcaagagctttgaagaaagtgccagttgatgagtatataaccacgtaccctggacaaggatgtgctggttatacacttgaggaagctaagactgctcttaagaaatgcaaatctgcattttatgtactaccttcagaagcacctaatgctaaggaagagattctaggaactgtatcctggaatttgagagaaatgcttgctcatgctgaagagacaagaaaattaatgcctatatgcatggatgttagagccataatggcaaccatccaacgtaagtataaaggaattaaaattcaagagggcatcgttgactatggtgtccgattcttcttttatactagtaaagagcctgtagcttctattattacgaagctgaactctctaaatgagccgcttgtcacaatgccaattggttatgtgacacatggttttaatcttgaagaggctgcgcgctgtatgcgttctcttaaagctcctgccgtagtgtcagtatcatcaccagatgctgttactacatataatggatacctcacttcgtcatcaaagacatctgaggagcactttgtagaaacagtttctttggctggctcttacagagattggtcctattcaggacagcgtacagagttaggtgttgaatttcttaagcgtggtgacaaaattgtgtaccacactctggagagccccgtcgagtttcatcttgacggtgaggttctttcacttgacaaactaaagagtctcttatccctgcgggaggttaagactataaaagtgttcacaactgtggacaacactaatctccacacacagcttgtggatatgtctatgacatatggacagcagtttggtccaacatacttggatggtgctgatgttacaaaaattaaacctcatgtaaatcatgagggtaagactttctttgtactacctagtgatgacacactacgtagtgaagctttcgagtactaccatactcttgatgagagttttcttggtaggtacatgtctgctttaaaccacacaaagaaatggaaatttcctcaagttggtggtttaacttcaattaaatgggctgataacaattgttatttgtctagtgttttattagcacttcaacagcttgaagtcaaattcaatgcaccagcacttcaagaggcttattatagagcccgtgctggtgatgctgctaacttttgtgcactcatactcgcttacagtaataaaactgttggcgagcttggtgatgtcagagaaactatgacccatcttctacagcatgctaatttggaatctgcaaagcgagttcttaatgtggtgtgtaaacattgtggtcagaaaactactaccttaacgggtgtagaagctgtgatgtatatgggtactctatcttatgataatcttaagacaggtgtttccattccatgtgtgtgtggtcgtgatgctacacaatatctagtacaacaagagtcttcttttgttatgatgtctgcaccacctgctgagtataaattacagcaaggtacattcttatgtgcgaatgagtacactggtaactatcagtgtggtcattacactcatataactgctaaggagaccctctatcgtattgacggagctcaccttacaaagatgtcagagtacaaaggaccagtgactgatgttttctacaaggaaacatcttacactacaaccatcaagcctgtgtcgtataaactcgatggagttacttacacagagattgaaccaaaattggatgggtattataaaaaggataatgcttactatacagagcagcctatagaccttgtaccaactcaaccattaccaaatgcgagttttgataatttcaaactcacatgttctaacacaaaatttgctgatgatttaaatcaaatgacaggcttcacaaagccagcttcacgagagctatctgtcacattcttcccagacttgaatggcgatgtagtggctattgactatagacactattcagcgagtttcaagaaaggtgctaaattactgcataagccaattgtttggcacattaaccaggctacaaccaagacaacgttcaaaccaaacacttggtgtttacgttgtctttggagtacaaagccagtagatacttcaaattcatttgaagttctggcagtagaagacacacaaggaatggacaatcttgcttgtgaaagtcaacaacccacctctgaagaagtagtggaaaatcctaccatacagaaggaagtcatagagtgtgacgtgaaaactaccgaagttgtaggcaatgtcatacttaaaccatcagatgaaggtgttaaagtaacacaagagttaggtcatgaggatcttatggctgcttatgtggaaaacacaagcattaccattaagaaacctaatgagctttcactagccttaggtttaaaaacaattgccactcatggtattgctgcaattaatagtgttccttggagtaaaattttggcttatgtcaaaccattcttaggacaagcagcaattacaacatcaaattgcgctaagagattagcacaacgtgtgtttaacaattatatgccttatgtgtttacattattgttccaattgtgtacttttactaaaagtaccaattctagaattagagcttcactacctacaactattgctaaaaatagtgttaagagtgttgctaaattatgtttggatgccggcattaattatgtgaagtcacccaaattttctaaattgttcacaatcgctatgtggctattgttgttaagtatttgcttaggttctctaatctgtgtaactgctgcttttggtgtactcttatctaattttggtgctccttcttattgtaatggcgttagagaattgtatcttaattcgtctaacgttactactatggatttctgtgaaggttcttttccttgcagcatttgtttaagtggattagactcccttgattcttatccagctcttgaaaccattcaggtgacgatttcatcgtacaagctagacttgacaattttaggtctggccgctgagtgggttttggcatatatgttgttcacaaaattcttttatttattaggtctttcagctataatgcaggtgttctttggctattttgctagtcatttcatcagcaattcttggctcatgtggtttatcattagtattgtacaaatggcacccgtttctgcaatggttaggatgtacatcttctttgcttctttctactacatatggaagagctatgttcatatcatggatggttgcacctcttcgacttgcatgatgtgctataagcgcaatcgtgccacacgcgttgagtgtacaactattgttaatggcatgaagagatctttctatgtctatgcaaatggaggccgtggcttctgcaagactcacaattggaattgtctcaattgtgacacattttgcactggtagtacattcattagtgatgaagttgctcgtgatttgtcactccagtttaaaagaccaatcaaccctactgaccagtcatcgtatattgttgatagtgttgctgtgaaaaatggcgcgcttcacctctactttgacaaggctggtcaaaagacctatgagagacatccgctctcccattttgtcaatttagacaatttgagagctaacaacactaaaggttcactgcctattaatgtcatagtttttgatggcaagtccaaatgcgacgagtctgcttctaagtctgcttctgtgtactacagtcagctgatgtgccaacctattctgttgcttgaccaagctcttgtatcagacgttggagatagtactgaagtttccgttaagatgtttgatgcttatgtcgacaccttttcagcaacttttagtgttcctatggaaaaacttaaggcacttgttgctacagctcacagcgagttagcaaagggtgtagctttagatggtgtcctttctacattcgtgtcagctgcccgacaaggtgttgttgataccgatgttgacacaaaggatgttattgaatgtctcaaactttcacatcactctgacttagaagtgacaggtgacagttgtaacaatttcatgctcacctataataaggttgaaaacatgacgcccagagatcttggcgcatgtattgactgtaatgcaaggcatatcaatgcccaagtagcaaaaagtcacaatgtttcactcatctggaatgtaaaagactacatgtctttatctgaacagctgcgtaaacaaattcgtagtgctgccaagaagaacaacataccttttagactaacttgtgctacaactagacaggttgtcaatgtcataactactaaaatctcactcaagggtggtaagattgttagtacttgttttaaacttatgcttaaggccacattattgtgcgttcttgctgcattggtttgttatatcgttatgccagtacatacattgtcaatccatgatggttacacaaatgaaatcattggttacaaagccattcaggatggtgtcactcgtgacatcatttctactgatgattgttttgcaaataaacatgctggttttgacgcatggtttagccagcgtggtggttcatacaaaaatgacaaaagctgccctgtagtagctgctatcattacaagagagattggtttcatagtgcctggcttaccgggtactgtgctgagagcaatcaatggtgacttcttgcattttctacctcgtgtttttagtgctgttggcaacatttgctacacaccttccaaactcattgagtatagtgattttgctacctctgcttgcgttcttgctgctgagtgtacaatttttaaggatgctatgggcaaacctgtgccatattgttatgacactaatttgctagagggttctatttcttatagtgagcttcgtccagacactcgttatgtgcttatggatggttccatcatacagtttcctaacacttacctggagggttctgttagagtagtaacaacttttgatgctgagtactgtagacatggtacatgcgaaaggtcagaagtaggtatttgcctatctaccagtggtagatgggttcttaataatgagcattacagagctctatcaggagttttctgtggtgttgatgcgatgaatctcatagctaacatctttactcctcttgtgcaacctgtgggtgctttagatgtgtctgcttcagtagtggctggtggtattattgccatattggtgacttgtgctgcctactactttatgaaattcagacgtgtttttggtgagtacaaccatgttgttgctgctaatgcacttttgtttttgatgtctttcactatactctgtctggtaccagcttacagctttctgccgggagtctactcagtcttttacttgtacttgacattctatttcaccaatgatgtttcattcttggctcaccttcaatggtttgccatgttttctcctattgtgcctttttggataacagcaatctatgtattctgtatttctctgaagcactgccattggttctttaacaactatcttaggaaaagagtcatgtttaatggagttacatttagtaccttcgaggaggctgctttgtgtacctttttgctcaacaaggaaatgtacctaaaattgcgtagcgagacactgttgccacttacacagtataacaggtatcttgctctatataacaagtacaagtatttcagtggagccttagatactaccagctatcgtgaagcagcttgctgccacttagcaaaggctctaaatgactttagcaactcaggtgctgatgttctctaccaaccaccacagacatcaatcacttctgctgttctgcagagtggttttaggaaaatggcattcccgtcaggcaaagttgaagggtgcatggtacaagtaacctgtggaactacaactcttaatggattgtggttggatgacacagtatactgtccaagacatgtcatttgcacagcagaagacatgcttaatcctaactatgaagatctgctcattcgcaaatccaaccatagctttcttgttcaggctggcaatgttcaacttcgtgttattggccattctatgcaaaattgtctgcttaggcttaaagttgatacttctaaccctaagacacccaagtataaatttgtccgtatccaacctggtcaaacattttcagttctagcatgctacaatggttcaccatctggtgtttatcagtgtgccatgagacctaatcataccattaaaggttctttccttaatggatcatgtggtagtgttggttttaacattgattatgattgcgtgtctttctgctatatgcatcatatggagcttccaacaggagtacacgctggtactgacttagaaggtaaattctatggtccatttgttgacagacaaactgcacaggctgcaggtacagacacaaccataacattaaatgttttggcatggctgtatgctgctgttatcaatggtgataggtggtttcttaatagattcaccactactttgaatgactttaaccttgtggcaatgaagtacaactatgaacctttgacacaagatcatgttgacatattgggacctctttctgctcaaacaggaattgccgtcttagatatgtgtgctgctttgaaagagctgctgcagaatggtatgaatggtcgtactatccttggtagcactattttagaagatgagtttacaccatttgatgttgttagacaatgctctggtgttaccttccaaggtaagttcaagaaaattgttaagggcactcatcattggatgcttttaactttcttgacatcactattgattcttgttcaaagtacacagtggtcactgtttttctttgtttacgagaatgctttcttgccatttactcttggtattatggcaattgctgcatgtgctatgctgcttgttaagcataagcacgcattcttgtgcttgtttctgttaccttctcttgcaacagttgcttactttaatatggtctacatgcctgctagctgggtgatgcgtatcatgacatggcttgaattggctgacactagcttgtctggttataggcttaaggattgtgttatgtatgcttcagctttagttttgcttattctcatgacagctcgcactgtttatgatgatgctgctagacgtgtttggacactgatgaatgtcattacacttgtttacaaagtctactatggtaatgctttagatcaagctatttccatgtgggccttagttatttctgtaacctctaactattctggtgtcgttacgactatcatgtttttagctagagctatagtgtttgtgtgtgttgagtattatccattgttatttattactggcaacaccttacagtgtatcatgcttgtttattgtttcttaggctattgttgctgctgctactttggccttttctgtttactcaaccgttacttcaggcttactcttggtgtttatgactacttggtctctacacaagaatttaggtatatgaactcccaggggcttttgcctcctaagagtagtattgatgctttcaagcttaacattaagttgttgggtattggaggtaaaccatgtatcaaggttgctactgtacagtctaaaatgtctgacgtaaagtgcacatctgtggtactgctctcggttcttcaacaacttagagtagagtcatcttctaaattgtgggcacaatgtgtacaactccacaatgatattcttcttgcaaaagacacaactgaagctttcgagaagatggtttctcttttgtctgttttgctatccatgcagggtgctgtagacattaataggttgtgcgaggaaatgctcgataaccgtgctactcttcaggctattgcttcagaatttagttctttaccatcatatgccgcttatgccactgcccaggaggcctatgagcaggctgtagctaatggtgattctgaagtcgttctcaaaaagttaaagaaatctttgaatgtggctaaatctgagtttgaccgtgatgctgccatgcaacgcaagttggaaaagatggcagatcaggctatgacccaaatgtacaaacaggcaagatctgaggacaagagggcaaaagtaactagtgctatgcaaacaatgctcttcactatgcttaggaagcttgataatgatgcacttaacaacattatcaacaatgcgcgtgatggttgtgttccactcaacatcataccattgactacagcagccaaactcatggttgttgtccctgattatggtacctacaagaacacttgtgatggtaacacctttacatatgcatctgcactctgggaaatccagcaagttgttgatgcggatagcaagattgttcaacttagtgaaattaacatggacaattcaccaaatttggcttggcctcttattgttacagctctaagagccaactcagctgttaaactacagaataatgaactgagtccagtagcactacgacagatgtcctgtgcggctggtaccacacaaacagcttgtactgatgacaatgcacttgcctactataacaattcgaagggaggtaggtttgtgctggcattactatcagaccaccaagatctcaaatgggctagattccctaagagtgatggtacaggtacaatttacacagaactggaaccaccttgtaggtttgttacagacacaccaaaagggcctaaagtgaaatacttgtacttcatcaaaggcttaaacaacctaaatagaggtatggtgctgggcagtttagctgctacagtacgtcttcaggctggaaatgctacagaagtacctgccaattcaactgtgctttccttctgtgcttttgcagtagaccctgctaaagcatataaggattacctagcaagtggaggacaaccaatcaccaactgtgtgaagatgttgtgtacacacactggtacaggacaggcaattactgtaacaccagaagctaacatggaccaagagtcctttggtggtgcttcatgttgtctgtattgtagatgccacattgaccatccaaatcctaaaggattctgtgacttgaaaggtaagtacgtccaaatacctaccacttgtgctaatgacccagtgggttttacacttagaaacacagtctgtaccgtctgcggaatgtggaaaggttatggctgtagttgtgatcaactccgcgaacccttgatgcagtctgcggatgcatcaacgtttttaaacgggtttgcggtgtaagtgcagcccgtcttacaccgtgcggcacaggcactagtactgatgtcgtctacagggcttttgatatttacaacgaaaaagttgctggttttgcaaagttcctaaaaactaattgctgtcgcttccaggagaaggatgaggaaggcaatttattagactcttactttgtagttaagaggcatactatgtctaactaccaacatgaagagactatttataacttggttaaagattgtccagcggttgctgtccatgactttttcaagtttagagtagatggtgacatggtaccacatatatcacgtcagcgtctaactaaatacacaatggctgatttagtctatgctctacgtcattttgatgagggtaattgtgatacattaaaagaaatactcgtcacatacaattgctgtgatgatgattatttcaataagaaggattggtatgacttcgtagagaatcctgacatcttacgcgtatatgctaacttaggtgagcgtgtacgccaatcattattaaagactgtacaattctgcgatgctatgcgtgatgcaggcattgtaggcgtactgacattagataatcaggatcttaatgggaactggtacgatttcggtgatttcgtacaagtagcaccaggctgcggagttcctattgtggattcatattactcattgctgatgcccatcctcactttgactagggcattggctgctgagtcccatatggatgctgatctcgcaaaaccacttattaagtgggatttgctgaaatatgattttacggaagagagactttgtctcttcgaccgttattttaaatattgggaccagacataccatcccaattgtattaactgtttggatgataggtgtatccttcattgtgcaaactttaatgtgttattttctactgtgtttccacctacaagttttggaccactagtaagaaaaatatttgtagatggtgttccttttgttgtttcaactggataccattttcgtgagttaggagtcgtacataatcaggatgtaaacttacatagctcgcgtctcagtttcaaggaacttttagtgtatgctgctgatccagctatgcatgcagcttctggcaatttattgctagataaacgcactacatgcttttcagtagctgcactaacaaacaatgttgcttttcaaactgtcaaacccggtaattttaataaagacttttatgactttgctgtgtctaaaggtttctttaaggaaggaagttctgttgaactaaaacacttcttctttgctcaggatggcaacgctgctatcagtgattatgactattatcgttataatctgccaacaatgtgtgatatcagacaactcctattcgtagttgaagttgttgataaatactttgattgttacgatggtggctgtattaatgccaaccaagtaatcgttaacaatctggataaatcagctggtttcccatttaataaatggggtaaggctagactttattatgactcaatgagttatgaggatcaagatgcacttttcgcgtatactaagcgtaatgtcatccctactataactcaaatgaatcttaagtatgccattagtgcaaagaatagagctcgcaccgtagctggtgtctctatctgtagtactatgacaaatagacagtttcatcagaaattattgaagtcaatagccgccactagaggagctactgtggtaattggaacaagcaagttttacggtggctggcataatatgttaaaaactgtttacagtgatgtagaaactccacaccttatgggttgggattatccaaaatgtgacagagccatgcctaacatgcttaggataatggcctctcttgttcttgctcgcaaacataacacttgctgtaacttatcacaccgtttctacaggttagctaacgagtgtgcgcaagtattaagtgagatggtcatgtgtggcggctcactatatgttaaaccaggtggaacatcatccggtgatgctacaactgcttatgctaatagtgtctttaacatttgtcaagctgttacagccaatgtaaatgcacttctttcaactgatggtaataagatagctgacaagtatgtccgcaatctacaacacaggctctatgagtgtctctatagaaatagggatgttgatcatgaattcgtggatgagttttacgcttacctgcgtaaacatttctccatgatgattctttctgatgatgccgttgtgtgctataacagtaactatgcggctcaaggtttagtagctagcattaagaactttaaggcagttctttattatcaaaataatgtgttcatgtctgaggcaaaatgttggactgagactgaccttactaaaggacctcacgaattttgctcacagcatacaatgctagttaaacaaggagatgattacgtgtacctgccttacccagatccatcaagaatattaggcgcaggctgttttgtcgatgatattgtcaaaacagatggtacacttatgattgaaaggttcgtgtcactggctattgatgcttacccacttacaaaacatcctaatcaggagtatgctgatgtctttcacttgtatttacaatacattagaaagttacatgatgagcttactggccacatgttggacatgtattccgtaatgctaactaatgataacacctcacggtactgggaacctgagttttatgaggctatgtacacaccacatacagtcttgcaggctgtaggtgcttgtgtattgtgcaattcacagacttcacttcgttgcggtgcctgtattaggagaccattcctatgttgcaagtgctgctatgaccatgtcatttcaacatcacacaaattagtgttgtctgttaatccctatgtttgcaatgccccaggttgtgatgtcactgatgtgacacaactgtatctaggaggtatgagctattattgcaagtcacataagcctcccattagttttccattatgtgctaatggtcaggtttttggtttatacaaaaacacatgtgtaggcagtgacaatgtcactgacttcaatgcgatagcaacatgtgattggactaatgctggcgattacatacttgccaacacttgtactgagagactcaagcttttcgcagcagaaacgctcaaagccactgaggaaacatttaagctgtcatatggtattgccactgtacgcgaagtactctctgacagagaattgcatctttcatgggaggttggaaaacctagaccaccattgaacagaaactatgtctttactggttaccgtgtaactaaaaatagtaaagtacagattggagagtacacctttgaaaaaggtgactatggtgatgctgttgtgtacagaggtactacgacatacaagttgaatgttggtgattactttgtgttgacatctcacactgtaatgccacttagtgcacctactctagtgccacaagagcactatgtgagaattactggcttgtacccaacactcaacatctcagatgagttttctagcaatgttgcaaattatcaaaaggtcggcatgcaaaagtactctacactccaaggaccacctggtactggtaagagtcattttgccatcggacttgctctctattacccatctgctcgcatagtgtatacggcatgctctcatgcagctgttgatgccctatgtgaaaaggcattaaaatatttgcccatagataaatgtagtagaatcatacctgcgcgtgcgcgcgtagagtgttttgataaattcaaagtgaattcaacactagaacagtatgttttctgcactgtaaatgcattgccagaaacaactgctgacattgtagtctttgatgaaatctctatggctactaattatgacttgagtgttgtcaatgctagacttcgtgcaaaacactacgtctatattggcgatcctgctcaattaccagccccccgcacattgctgactaaaggcacactagaaccagaatattttaattcagtgtgcagacttatgaaaacaataggtccagacatgttccttggaacttgtcgccgttgtcctgctgaaattgttgacactgtgagtgctttagtttatgacaataagctaaaagcacacaaggataagtcagctcaatgcttcaaaatgttctacaaaggtgttattacacatgatgtttcatctgcaatcaacagacctcaaataggcgttgtaagagaatttcttacacgcaatcctgcttggagaaaagctgtttttatctcaccttataattcacagaacgctgtagcttcaaaaatcttaggattgcctacgcagactgttgattcatcacagggttctgaatatgactatgtcatattcacacaaactactgaaacagcacactcttgtaatgtcaaccgcttcaatgtggctatcacaagggcaaaaattggcattttgtgcataatgtctgatagagatctttatgacaaactgcaatttacaagtctagaaataccacgtcgcaatgtggctacattacaagcagaaaatgtaactggactttttaaggactgtagtaagatcattactggtcttcatcctacacaggcacctacacacctcagcgttgatataaagttcaagactgaaggattatgtgttgacataccaggcataccaaaggacatgacctaccgtagactcatctctatgatgggtttcaaaatgaattaccaagtcaatggttaccctaatatgtttatcacccgcgaagaagctattcgtcacgttcgtgcgtggattggctttgatgtagagggctgtcatgcaactagagatgctgtgggtactaacctacctctccagctaggattttctacaggtgttaacttagtagctgtaccgactggttatgttgacactgaaaataacacagaattcaccagagttaatgcaaaacctccaccaggtgaccagtttaaacatcttataccactcatgtataaaggcttgccctggaatgtagtgcgtattaagatagtacaaatgctcagtgatacactgaaaggattgtcagacagagtcgtgttcgtcctttgggcgcatggctttgagcttacatcaatgaagtactttgtcaagattggacctgaaagaacgtgttgtctgtgtgacaaacgtgcaacttgcttttctacttcatcagatacttatgcctgctggaatcattctgtgggttttgactatgtctataacccatttatgattgatgttcagcagtggggctttacgggtaaccttcagagtaaccatgaccaacattgccaggtacatggaaatgcacatgtggctagttgtgatgctatcatgactagatgtttagcagtccatgagtgctttgttaagcgcgttgattggtctgttgaataccctattataggagatgaactgagggttaattctgcttgcagaaaagtacaacacatggttgtgaagtctgcattgcttgctgataagtttccagttcttcatgacattggaaatccaaaggctatcaagtgtgtgcctcaggctgaagtagaatggaagttctacgatgctcagccatgtagtgacaaagcttacaaaatagaggaactcttctattcttatgctacacatcacgataaattcactgatggtgtttgtttgttttggaattgtaacgttgatcgttacccagccaatgcaattgtgtgtaggtttgacacaagagtcttgtcaaacttgaacttaccaggctgtgatggtggtagtttgtatgtgaataagcatgcattccacactccagctttcgataaaagtgcatttactaatttaaagcaattgcctttcttttactattctgatagtccttgtgagtctcatggcaaacaagtagtgtcggatattgattatgttccactcaaatctgctacgtgtattacacgatgcaatttaggtggtgctgtttgcagacaccatgcaaatgagtaccgacagtacttggatgcatataatatgatgatttctgctggatttagcctatggatttacaaacaatttgatacttataacctgtggaatacatttaccaggttacagagtttagaaaatgtggcttataatgttgttaataaaggacactttgatggacacgccggcgaagcacctgtttccatcattaataatgctgtttacacaaaggtagatggtattgatgtggagatctttgaaaataagacaacacttcctgttaatgttgcatttgagctttgggctaagcgtaacattaaaccagtgccagagattaagatactcaataatttgggtgttgatatcgctgctaatactgtaatctgggactacaaaagagaagccccagcacatgtatctacaataggtgtctgcacaatgactgacattgccaagaaacctactgagagtgcttgttcttcacttactgtcttgtttgatggtagagtggaaggacaggtagacctttttagaaacgcccgtaatggtgttttaataacagaaggttcagtcaaaggtctaacaccttcaaagggaccagcacaagctagcgtcaatggagtcacattaattggagaatcagtaaaaacacagtttaactactttaagaaagtagacggcattattcaacagttgcctgaaacctactttactcagagcagagacttagaggattttaagcccagatcacaaatggaaactgactttctcgagctcgctatggatgaattcatacagcgatataagctcgagggctatgccttcgaacacatcgtttatggagatttcagtcatggacaacttggcggtcttcatttaatgataggcttagccaagcgctcacaagattcaccacttaaattagaggattttatccctatggacagcacagtgaaaaattacttcataacagatgcgcaaacaggttcatcaaaatgtgtgtgttctgtgattgatcttttacttgatgactttgtcgagataataaagtcacaagatttgtcagtgatttcaaaagtggtcaaggttacaattgactatgctgaaatttcattcatgctttggtgtaaggatggacatgttgaaaccttctacccaaaactacaagcaagtcaagcgtggcaaccaggtgttgcgatgcctaacttgtacaagatgcaaagaatgcttcttgaaaagtgtgaccttcagaattatggtgaaaatgctgttataccaaaaggaataatgatgaatgtcgcaaagtatactcaactgtgtcaatacttaaatacacttactttagctgtaccctacaacatgagagttattcactttggtgctggctctgataaaggagttgcaccaggtacagctgtgctcagacaatggttgccaactggcacactacttgtcgattcagatcttaatgacttcgtctccgacgcagattctactttaattggagactgtgcaacagtacatacggctaataaatgggaccttattattagcgatatgtatgaccctaggaccaaacatgtgacaaaagagaatgactctaaagaagggtttttcacttatctgtgtggatttataaagcaaaaactagccctgggtggttctatagctgtaaagataacagagcattcttggaatgctgacctttacaagcttatgggccatttctcatggtggacagcttttgttacaaatgtaaatgcatcatcatcggaagcatttttaattggggctaactatcttggcaagccgaaggaacaaattgatggctataccatgcatgctaactacattttctggaggaacacaaatcctatccagttgtcttcctattcactctttgacatgagcaaatttcctcttaaattaagaggaactgctgtaatgtctcttaaggagaatcaaatcaatgatatgatttattctcttctggaaaaaggtaggcttatcattagagaaaacaacagagttgtggtttcaagtgatattcttgttaacaactaaacgaacatgtttattttcttattatttcttactctcactagtggtagtgaccttgaccggtgcaccacttttgatgatgttcaagctcctaattacactcaacatacttcatctatgaggggggtttactatcctgatgaaatttttagatcagacactctttatttaactcaggatttatttcttccattttattctaatgttacagggtttcatactattaatcatacgtttggcaaccctgtcataccttttaaggatggtatttattttgctgccacagagaaatcaaatgttgtccgtggttgggtttttggttctaccatgaacaacaagtcacagtcggtgattattattaacaattctactaatgttgttatacgagcatgtaactttgaattgtgtgacaaccctttctttgctgtttctaaacccatgggtacacagacacatactatgatattcgataatgcatttaattgcactttcgagtacatatctgatgccttttcgcttgatgtttcagaaaagtcaggtaattttaaacacttacgagagtttgtgtttaaaaataaagatgggtttctctatgtttataagggctatcaacctatagatgtagttcgtgatctaccttctggttttaacactttgaaacctatttttaagttgcctcttggtattaacattacaaattttagagccattcttacagccttttcacctgctcaagacatttggggcacgtcagctgcagcctattttgttggctatttaaagccaactacatttatgctcaagtatgatgaaaatggtacaatcacagatgctgttgattgttctcaaaatccacttgctgaactcaaatgctctgttaagagctttgagattgacaaaggaatttaccagacctctaatttcagggttgttccctcaggagatgttgtgagattccctaatattacaaacttgtgtccttttggagaggtttttaatgctactaaattcccttctgtctatgcatgggagagaaaaaaaatttctaattgtgttgctgattactctgtgctctacaactcaacatttttttcaacctttaagtgctatggcgtttctgccactaagttgaatgatctttgcttctccaatgtctatgcagattcttttgtagtcaagggagatgatgtaagacaaatagcgccaggacaaactggtgttattgctgattataattataaattgccagatgatttcatgggttgtgtccttgcttggaatactaggaacattgatgctacttcaactggtaattataattataaatataggtatcttagacatggcaagcttaggccctttgagagagacatatctaatgtgcctttctcccctgatggcaaaccttgcaccccacctgctcttaattgttattggccattaaatgattatggtttttacaccactactggcattggctaccaaccttacagagttgtagtactttcttttgaacttttaaatgcaccggccacggtttgtggaccaaaattatccactgaccttattaagaaccagtgtgtcaattttaattttaatggactcactggtactggtgtgttaactccttcttcaaagagatttcaaccatttcaacaatttggccgtgatgtttctgatttcactgattccgttcgagatcctaaaacatctgaaatattagacatttcaccttgctcttttgggggtgtaagtgtaattacacctggaacaaatgcttcatctgaagttgctgttctatatcaagatgttaactgcactgatgtttctacagcaattcatgcagatcaactcacaccagcttggcgcatatattctactggaaacaatgtattccagactcaagcaggctgtcttataggagctgagcatgtcgacacttcttatgagtgcgacattcctattggagctggcatttgtgctagttaccatacagtttctttattacgtagtactagccaaaaatctattgtggcttatactatgtctttaggtgctgatagttcaattgcttactctaataacaccattgctatacctactaacttttcaattagcattactacagaagtaatgcctgtttctatggctaaaacctccgtagattgtaatatgtacatctgcggagattctactgaatgtgctaatttgcttctccaatatggtagcttttgcacacaactaaatcgtgcactctcaggtattgctgctgaacaggatcgcaacacacgtgaagtgttcgctcaagtcaaacaaatgtacaaaaccccaactttgaaatattttggtggttttaatttttcacaaatattacctgaccctctaaagccaactaagaggtcttttattgaggacttgctctttaataaggtgacactcgctgatgctggcttcatgaagcaatatggcgaatgcctaggtgatattaatgctagagatctcatttgtgcgcagaagttcaatggacttacagtgttgccacctctgctcactgatgatatgattgctgcctacactgctgctctagttagtggtactgccactgctggatggacatttggtgctggcgctgctcttcaaataccttttgctatgcaaatggcatataggttcaatggcattggagttacccaaaatgttctctatgagaaccaaaaacaaatcgccaaccaatttaacaaggcgattagtcaaattcaagaatcacttacaacaacatcaactgcattgggcaagctgcaagacgttgttaaccagaatgctcaagcattaaacacacttgttaaacaacttagctctaattttggtgcaatttcaagtgtgctaaatgatatcctttcgcgacttgataaagtcgaggcggaggtacaaattgacaggttaattacaggcagacttcaaagccttcaaacctatgtaacacaacaactaatcagggctgctgaaatcagggcttctgctaatcttgctgctactaaaatgtctgagtgtgttcttggacaatcaaaaagagttgacttttgtggaaagggctaccaccttatgtccttcccacaagcagccccgcatggtgttgtcttcctacatgtcacgtatgtgccatcccaggagaggaacttcaccacagcgccagcaatttgtcatgaaggcaaagcatacttccctcgtgaaggtgtttttgtgtttaatggcacttcttggtttattacacagaggaacttcttttctccacaaataattactacagacaatacatttgtctcaggaaattgtgatgtcgttattggcatcattaacaacacagtttatgatcctctgcaacctgagcttgactcattcaaagaagagctggacaagtacttcaaaaatcatacatcaccagatgttgatcttggcgacatttcaggcattaacgcttctgtcgtcaacattcaaaaagaaattgaccgcctcaatgaggtcgctaaaaatttaaatgaatcactcattgaccttcaagaattgggaaaatatgagcaatatattaaatggccttggtatgtttggctcggcttcattgctggactaattgccatcgtcatggttacaatcttgctttgttgcatgactagttgttgcagttgcctcaagggtgcatgctcttgtggttcttgctgcaagtttgatgaggatgactctgagccagttctcaagggtgtcaaattacattacacataaacgaacttatggatttgtttatgagattttttactcttggatcaattactgcacagccagtaaaaattgacaatgcttctcctgcaagtactgttcatgctacagcaacgataccgctacaagcctcactccctttcggatggcttgttattggcgttgcatttcttgctgtttttcagagcgctaccaaaataattgcgctcaataaaagatggcagctagccctttataagggcttccagttcatttgcaatttactgctgctatttgttaccatctattcacatcttttgcttgtcgctgcaggtatggaggcgcaatttttgtacctctatgccttgatatattttctacaatgcatcaacgcatgtagaattattatgagatgttggctttgttggaagtgcaaatccaagaacccattactttatgatgccaactactttgtttgctggcacacacataactatgactactgtataccatataacagtgtcacagatacaattgtcgttactgaaggtgacggcatttcaacaccaaaactcaaagaagactaccaaattggtggttattctgaggataggcactcaggtgttaaagactatgtcgttgtacatggctatttcaccgaagtttactaccagcttgagtctacacaaattactacagacactggtattgaaaatgctacattcttcatctttaacaagcttgttaaagacccaccgaatgtgcaaatacacacaatcgacggctcttcaggagttgctaatccagcaatggatccaatttatgatgagccgacgacgactactagcgtgcctttgtaagcacaagaaagtgagtacgaacttatgtactcattcgtttcggaagaaacaggtacgttaatagttaatagcgtacttctttttcttgctttcgtggtattcttgctagttacactagccatccttactgcgcttcgattgtgtgcgtactgctgcaatattgttaacgtgagtttagtaaaaccaacggtttacgtctactcgcgtgttaaaaatctgaactcttctgaaggagttcctgatcttctggtctaaacgaactaactattattattattctgtttggaactttaacattgcttatcatggcagacaacggtactattaccgttgaggagcttaaacaactcctggaacaatggaacctagtaataggtttcctatgcctagcctggattatgttactacaatttgcctattctaatcggaacaggtttttgtacataataaagcttgttttcctctggctcttgtggccagtaacacttgcttgttttgtgcttgctgctgtctacagaattaattgggtgactggcgggattgcgattgcaatggcttgtattgtaggcttgatgtggcttagctacttcgttgcttccttcaggctgtttgctcgtacccgctcaatgtggtcattcaacccagaaacaaacattcttctcaatgtgcctctccgggggacaattgtgaccagaccgctcatggaaagtgaacttgtcattggtgctgtgatcattcgtggtcacttgcgaatggccggacactccctagggcgctgtgacattaaggacctgccaaaagagatcactgtggctacatcacgaacgctttcttattacaaattaggagcgtcgcagcgtgtaggcactgattcaggttttgctgcatacaaccgctaccgtattggaaactataaattaaatacagaccacgccggtagcaacgacaatattgctttgctagtacagtaagtgacaacagatgtttcatcttgttgacttccaggttacaatagcagagatattgattatcattatgaggactttcaggattgctatttggaatcttgacgttataataagttcaatagtgagacaattatttaagcctctaactaagaagaattattcggagttagatgatgaagaacctatggagttagattatccataaaacgaacatgaaaattattctcttcctgacattgattgtatttacatcttgcgagctatatcactatcaggagtgtgttagaggtacgactgtactactaaaagaaccttgcccatcaggaacatacgagggcaattcaccatttcaccctcttgctgacaataaatttgcactaacttgcactagcacacactttgcttttgcttgtgctgacggtactcgacatacctatcagctgcgtgcaagatcagtttcaccaaaacttttcatcagacaagaggaggttcaacaagagctctactcgccactttttctcattgttgctgctctagtatttttaatactttgcttcaccattaagagaaagacagaatgaatgagctcactttaattgacttctatttgtgctttttagcctttctgctattccttgttttaataatgcttattatattttggttttcactcgaaatccaggatctagaagaaccttgtaccaaagtctaaacgaacatgaaacttctcattgttttgacttgtatttctttatgcagttgcatatgcactgtagtacagcgctgtgcatctaataaacctcatgtgcttgaagatccttgtaaggtacaacactaggggtaatacttatagcactgcttggctttgtgctctaggaaaggttttaccttttcatagatggcacactatggttcaaacatgcacacctaatgttactatcaactgtcaagatccagctggtggtgcgcttatagctaggtgttggtaccttcatgaaggtcaccaaactgctgcatttagagacgtacttgttgttttaaataaacgaacaaattaaaatgtctgataatggaccccaatcaaaccaacgtagtgccccccgcattacatttggtggacccacagattcaactgacaataaccagaatggaggacgcaatggggcaaggccaaaacagcgccgaccccaaggtttacccaataatactgcgtcttggttcacagctctcactcagcatggcaaggaggaacttagattccctcgaggccagggcgttccaatcaacaccaatagtggtccagatgaccaaattggctactaccgaagagctacccgacgagttcgtggtggtgacggcaaaatgaaagagctcagccccagatggtacttctattacctaggaactggcccagaagcttcacttccctacggcgctaacaaagaaggcatcgtatgggttgcaactgagggagccttgaatacacccaaagaccacattggcacccgcaatcctaataacaatgctgccaccgtgctacaacttcctcaaggaacaacattgccaaaaggcttctacgcagagggaagcagaggcggcagtcaagcctcttctcgctcctcatcacgtagtcgcggtaattcaagaaattcaactcctggcagcagtaggggaaattctcctgctcgaatggctagcggaggtggtgaaactgccctcgcgctattgctgctagacagattgaaccagcttgagagcaaagtttctggtaaaggccaacaacaacaaggccaaactgtcactaagaaatctgctgctgaggcatctaaaaagcctcgccaaaaacgtactgccacaaaacagtacaacgtcactcaagcatttgggagacgtggtccagaacaaacccaaggaaatttcggggaccaagacctaatcagacaaggaactgattacaaacattggccgcaaattgcacaatttgctccaagtgcctctgcattctttggaatgtcacgcattggcatggaagtcacaccttcgggaacatggctgacttatcatggagccattaaattggatgacaaagatccacaattcaaagacaacgtcatactgctgaacaagcacattgacgcatacaaaacattcccaccaacagagcctaaaaaggacaaaaagaaaaagactgatgaagctcagcctttgccgcagagacaaaagaagcagcccactgtgactcttcttcctgcggctgacatggatgatttctccagacaacttcaaaattccatgagtggagcttctgctgattcaactcaggcataaacactcatgatgaccacacaaggcagatgggctatgtaaacgttttcgcaattccgtttacgatacatagtctactcttgtgcagaatgaattctcgtaactaaacagcacaagtaggtttagttaactttaatctcacatagcaatctttaatcaatgtgtaacattagggaggacttgaaagagccaccacattttcatcgaggccacgcggagtacgatcgagggtacagtgaataatgctagggagagctgcctatatggaagagccctaatgtgtaaaattaattttagtagtgctatccccatgtgattttaatagcttcttaggagaatgac

SEQ ID NO: 85 - DNA, 29751 bp, Coronavirus; identical to SEQ ID NO: 73

SEQ ID NO: 86 - DNA, 29727 bp, Coronavirus
atattaggtttttacctacccaggaaaagccaaccaacctcgatctcttgtagatctgttctctaaacgaactttaaaatctgtgtagctgtcgctcggctgcatgcctagtgcacctacgcagtataaacaataataaattttactgtcgttgacaagaaacgagtaactcgtccctcttctgcagactgcttacggtttcgtccgtgttgcagtcgatcatcagcatacctaggtttcgtccgggtgtgaccgaaaggtaagatggagagccttgttcttggtgtcaacgagaaaacacacgtccaactcagtttgcctgtccttcaggttagagacgtgctagtgcgtggcttcggggactctgtggaagaggccctatcggaggcacgtgaacacctcaaaaatggcacttgtggtctagtagagctggaaaaaggcgtactgccccagcttgaacagccctatgtgttcattaaacgttctgatgccttaagcaccaatcacggccacaaggtcgttgagctggttgcagaaatggacggcattcagtacggtcgtagcggtataacactgggagtactcgtgccacatgtgggcgaaaccccaattgcataccgcaatgttcttcttcgtaagaacggtaataagggagccggtggtcatagctatggcatcgatctaaagtcttatgacttaggtgacgagcttggcactgatcccattgaagattatgaacaaaactggaacactaagcatggcagtggtgcactccgtgaactcactcgtgagctcaatggaggtgcagtcactcgctatgtcgacaacaatttctgtggcccagatgggtaccctcttgattgcatcaaagattttctcgcacgcgcgggcaagtcaatgtgcactctttccgaacaacttgattacatcgagtcgaagagaggtgtctactgctgccgtgaccatgagcatgaaattgcctggttcactgagcgctctgataagagctacgagcaccagacacccttcgaaattaagagtgccaagaaatttgacactttcaaaggggaatgcccaaagtttgtgtttcctcttaactcaaaagtcaaagtcattcaaccacgtgttgaaaagaaaaagactgagggtttcatggggcgtatacgctctgtgtaccctgttgcatctccacaggagtgtaacaatatgcacttgtctaccttgatgaaatgtaatcattgcgatgaagtttcatggcagacgtgcgactttctgaaagccacttgtgaacattgtggcactgaaaatttagttattgaaggacctactacatgtgggtacctacctactaatgctgtagtgaaaatgccatgtcctgcctgtcaagacccagagattggacctgagcatagtgttgcagattatcacaaccactcaaacattgaaactcgactccgcaagggaggtaggactagatgttttggaggctgtgtgtttgcctatgttggctgctataataagcgtgcctactgggttcctcgtgctagtgctgatattggctcaggccatactggcattactggtgacaatgtggagaccttgaatgaggatctccttgagatactgagtcgtgaacgtgttaacattaacattgttggcgattttcatttgaatgaagaggttgccatcattttggcatctttctctgcttctacaagtgcctttattgacactataaagagtcttgattacaagtctttcaaaaccattgttgagtcctgcggtaactataaagttaccaagggaaagcccgtaaaaggtgcttggaacattggacaacagagatcagttttaacaccactgtgtggttttccctcacaggctgctggtgttatcagatcaatttttgcgcgcacacttgatgcagcaaaccactcaattcctgatttgcaaagagcagctgtcaccatacttgatggtatttctgaacagtcattacgtcttgtcgacgccatggtttatacttcagacctgctcaccaacagtgtcattattatggcatatgtaactggtggtcttgtacaacagacttctcagtggttgtctaatcttttgggcactactgttgaaaaactcaggcctatctttgaatggattgaggcgaaacttagtgcaggagttgaatttctcaaggatgcttgggagattctcaaatttctcattacaggtgtttttgacatcgtcaagggtcaaatacaggttgcttcagataacatcaaggattgtgtaaaatgcttcattgatgttgttaacaaggcactcgaaatgtgcattgatcaagtcactatcgctggcgcaaagttgcgatcactcaacttaggtgaagtcttcatcgctcaaagcaagggactttaccgtcagtgtatacgtggcaaggagcagctgcaactactcatgcctcttaaggcaccaaaagaagtaacctttcttgaaggtgattcacatgacacagtacttacctctgaggaggttgttctcaagaacggtgaactcgaagcactcgagacgcccgttgatagcttcacaaatggagctatcgttggcacaccagtctgtgtaaatggcctcatgctcttagagattaaggacaaagaacaatactgcgcattgtctcctggtttactggctacaaacaatgtctttcgcttaaaagggggtgcaccaattaaaggtgtaacctttggagaagatactgtttgggaagttcaaggttacaagaatgtgagaatcacatttgagcttgatgaacgtgttgacaaagtgcttaatgaaaagtgctctgtctacactgttgaatccggtaccgaagttactgagtttgcatgtgttgtagcagaggctgttgtgaagactttacaaccagtttctgatctccttaccaacatgggtattgatcttgatgagtggagtgtagctacattctacttatttgatgatgctggtgaagaaaacttttcatcacgtatgtattgttccttttaccctccagatgaggaagaagaggacgatgcagagtgtgaggaagaagaaattgatgaaacctgtgaacatgagtacggtacagaggatgattatcaaggtctccctctggaatttggtgcctcagctgaaacagttcgagttgaggaagaagaagaggaagactggctggatgatactactgagcaatcagagattgagccagaaccagaacctacacctgaagaaccagttaatcagtttactggttatttaaaacttactgacaatgttgccattaaatgtgttgacatcgttaaggaggcacaaagtgctaatcctatggtgattgtaaatgctgctaacatacacctgaaacatggtggtggtgtagcaggtgcactcaacaaggcaaccaatggtgccatgcaaaaggagagtgatgattacattaagctaaatggccctcttacagtaggagggtcttgtttgctttctggacataatcttgctaagaagtgtctgcatgttgttggacctaacctaaatgcaggtgaggacatccagcttcttaaggcagcatatgaaaatttcaattcacaggacatcttacttgcaccattgttgtcagcaggcatatttggtgctaaaccacttcagtctttacaagtgtgcgtgcagacggttcgtacacaggtttatattgcagtcaatgacaaagctctttatgagcaggttgtcatggattatcttgataacctgaagcctagagtggaagcacctaaacaagaggagccaccaaacacagaagattccaaaactgaggagaaatctgtcgtacagaagcctgtcgatgtgaagccaaaaattaaggcctgcattgatgaggttaccacaacactggaagaaactaagtttcttaccaataagttactcttgtttgctgatatcaatggtaagctttaccatgattctcagaacatgcttagaggtgaagatatgtctttccttgagaaggatgcaccttacatggtaggtgatgttatcactagtggtgatatcacttgtgttgtaataccctccaaaaaggctggtggcactactgagatgctctcaagagctttgaagaaagtgccagttgatgagtatataaccacgtaccctggacaaggatgtgctggttatacacttgaggaagctaagactgctcttaagaaatgcaaatctgcattttatgtactaccttcagaagcacctaatgctaaggaagagattctaggaactgtatcctggaatttgagagaaatgcttgctcatgctgaagagacaagaaaattaatgcctatatgcatggatgttagagccataatggcaaccatccaacgtaagtataaaggaattaaaattcaagagggcatcgttgactatggtgtccgattcttcttttatactagtaaagagcctgtagcttctattattacgaagctgaactctctaaatgagccgcttgtcacaatgccaattggttatgtgacacatggttttaatcttgaagaggctgcgcgctgtatgcgttctcttaaagctcctgccgtagtgtcagtatcatcaccagatgctgttactacatataatggatacctcacttcgtcatcaaagacatctgaggagcactttgtagaaacagtttctttggctggctcttacagagattggtcctattcaggacagcgtacagagttaggtgttgaatttcttaagcgtggtgacaaaattgtgtaccacactctggagagccccgtcgagtttcatcttgacggtgaggttctttcacttgacaaactaaagagtctcttatccctgcgggaggttaagactataaaagtgttcacaactgtggacaacactaatctccacacacagcttgtggatatgtctatgacatatggacagcagtttggtccaacatacttggatggtgctgatgttacaaaaattaaacctcatgtaaatcatgagggtaagactttctttgtactacctagtgatgacacactacgtagtgaagctttcgagtactaccatactcttgatgagagttttcttggtaggtacatgtctgctttaaaccacacaaagaaatggaaatttcctcaagttggtggtttaacttcaattaaatgggctgataacaattgttatttgtctagtgttttattagcacttcaacagcttgaagtcaaattcaatgcaccagcacttcaagaggcttattatagagcccgtgctggtgatgctgctaacttttgtgcactcatactcgcttacagtaataaaactgttggcgagcttggtgatgtcagagaaactatgacccatcttctacagcatgctaatttggaatctgcaaagcgagttcttaatgtggtgtgtaaacattgtggtcagaaaactactaccttaacgggtgtagaagctgtgatgtatatgggtactctatcttatgataatcttaagacaggtgtttccattccatgtgtgtgtggtcgtgatgctacacaatatctagtacaacaagagtcttcttttgttatgatgtctgcaccacctgctgagtataaattacagcaaggtacattcttatgtgcgaatgagtacactggtaactatcagtgtggtcattacactcatataactgctaaggagaccctctatcgtattgacggagctcaccttacaaagatgtcagagtacaaaggaccagtgactgatgttttctacaaggaaacatcttacactacaaccatcaagcctgtgtcgtataaactcgatggagttacttacacagagattgaaccaaaattggatgggtattataaaaaggataatgcttactatacagagcagcctatagaccttgtaccaactcaaccattaccaaatgcgagttttgataatttcaaactcacatgttctaacacaaaatttgctgatgatttaaatcaaatgacaggcttcacaaagccagcttcacgagagctatctgtcacattcttcccagacttgaatggcgatgtagtggctattgactatagacactattcagcgagtttcaagaaaggtgctaaattactgcataagccaattgtttggcacattaaccaggctacaaccaagacaacgttcaaaccaaacacttggtgtttacgttgtctttggagtacaaagccagtagatacttcaaattcatttgaagttctggcagtagaagacacacaaggaatggacaatcttgcttgtgaaagtcaacaacccacctctgaagaagtagtggaaaatcctaccatacagaaggaagtcatagagtgtgacgtgaaaactaccgaagttgtaggcaatgtcatacttaaaccatcagatgaaggtgttaaagtaacacaagagttaggtcatgaggatcttatggctgcttatgtggaaaacacaagcattaccattaagaaacctaatgagctttcactagccttaggtttaaaaacaattgccactcatggtattgctgcaattaatagtgttccttggagtaaaattttggcttatgtcaaaccattcttaggacaagcagcaattacaacatcaaattgcgctaagagattagcacaacgtgtgtttaacaattatatgccttatgtgtttacattattgttccaattgtgtacttttactaaaagtaccaattctagaattagagcttcactacctacaactattgctaaaaatagtgttaagagtgttgctaaattatgtttggatgccggcattaattatgtgaagtcacccaaattttctaaattgttcacaatcgctatgtggctattgttgttaagtatttgcttaggttctctaatctgtgtaactgctgcttttggtgtactcttatctaattttggtgctccttcttattgtaatggcgttagagaattgtatcttaattcgtctaacgttactactatggatttctgtgaaggttcttttccttgcagcatttgtttaagtggattagactcccttgattcttatccagctcttgaaaccattcaggtgacgatttcatcgtacaagctagacttgacaattttaggtctggccgctgagtgggttttggcatatatgttgttcacaaaattcttttatttattaggtctttcagctataatgcaggtgttctttggctattttgctagtcatttcatcagcaattcttggctcatgtggtttatcattagtattgtacaaatggcacccgtttctgcaatggttaggatgtacatcttctttgcttctttctactacatatggaagagctatgttcatatcatggatggttgcacctcttcgacttgcatgatgtgctataagcgcaatcgtgccacacgcgttgagtgtacaactattgttaatggcatgaagagatctttctatgtctatgcaaatggaggccgtggcttctgcaagactcacaattggaattgtctcaattgtgacacattttgcactggtagtacattcattagtgatgaagttgctcgtgatttgtcactccagtttaaaagaccaatcaaccctactgaccagtcatcgtatattgttgatagtgttgctgtgaaaaatggcgcgcttcacctctactttgacaaggctggtcaaaagacctatgagagacatccgctctcccattttgtcaatttagacaatttgagagctaacaacactaaaggttcactgcctattaatgtcatagtttttgatggcaagtccaaatgcgacgagtctgcttctaagtctgcttctgtgtactacagtcagctgatgtgccaacctattctgttgcttgaccaagttcttgtatcagacgttggagatagtactgaagtttccgttaagatgtttgatgcttatgtcgacaccttttcagcaacttttagtgttcctatggaaaaacttaaggcacttgttgctacagctcacagcgagttagcaaagggtgtagctttagatggtgtcctttctacattcgtgtcagctgcccgacaaggtgttgttgataccgatgttgacacaaaggatgttattgaatgtctcaaactttcacatcactctgacttagaagtgacaggtgacagttgtaacaatttcatgctcacctataataaggttgaaaacatgacgcccagagatcttggcgcatgtattgactgtaatgcaaggcatatcaatgcccaagtagcaaaaagtcacaatgtttcactcatctggaatgtaaaagactacatgtctttatctgaacagctgcgtaaacaaattcgtagtgctgccaagaagaacaacataccttttagactaacttgtgctacaactagacaggttgtcaatgtcataactactaaaatctcactcaagggtggtaagattgttagtacttgttttaaacttatgcttaaggccacattattgtgcgttcttgctgcattggtttgttatatcgttatgccagtacatacattgtcaatccatgatggttacacaaatgaaatcattggttacaaagccattcaggatggtgtcactcgtgacatcatttctactgatgattgttttgcaaataaacatgctggttttgacgcatggtttagccagcgtggtggttcatacaaaaatgacaaaagctgccctgtagtagctgctatcattacaagagagattggtttcatagtgcctggcttaccgggtactgtgctgagagcaatcaatggtgacttcttgcattttctacctcgtgtttttagtgctgttggcaacatttgctacacaccttccaaactcattgagtatagtgattttgctacctctgcttgcgttcttgctgctgagtgtacaatttttaaggatgctatgggcaaacctgtgccatattgttatgacactaatttgctagagggttctatttcttatagtgagcttcgtccagacactcgttatgtgcttatggatggttccatcatacagtttcctaacacttacctggagggttctgttagagtagtaacaacttttgatgctgagtactgtagacatggtacatgcgaaaggtcagaagtaggtatttgcctatctaccagtggtagatgggttcttaataatgagcattacagagctctatcaggagttttctgtggtgttgatgcgatgaatctcatagctaacatctttactcctcttgtgcaacctgtgggtgctttagatgtgtctgcttcagtagtggctggtggtattattgccatattggtgacttgtgctgcctactactttatgaaattcagacgtgtttttggtgagtacaaccatgttgttgctgctaatgcacttttgtttttgatgtctttcactatactctgtctggtaccagcttacagctttctgccgggagtctactcagtcttttacttgtacttgacattctatttcaccaatgatgtttcattcttggctcaccttcaatggtttgccatgttttctcctattgtgcctttttggataacagcaatctatgtattctgtatttctctgaagcactgccattggttctttaacaactatcttaggaaaagagtcatgtttaatggagttacatttagtaccttcgaggaggctgctttgtgtacctttttgctcaacaaggaaatgtacctaaaattgcgtagcgagacactgttgccacttacacagtataacaggtatcttgctctatataacaagtacaagtatttcagtggagccttagatactaccagctatcgtgaagcagcttgctgccacttagcaaaggctctaaatgactttagcaactcaggtgctgatgttctctaccaaccaccacagacatcaatcacttctgctgttctgcagagtggttttaggaaaatggcattcccgtcaggcaaagttgaagggtgcatggtacaagtaacctgtggaactacaactcttaatggattgtggttggatgacacagtatactgtccaagacatgtcatttgcacagcagaagacatgcttaatcctaactatgaagatctgctcattcgcaaatccaaccatagctttcttgttcaggctggcaatgttcaacttcgtgttattggccattctatgcaaaattgtctgcttaggcttaaagttgatacttctaaccctaagacacccaagtataaatttgtccgtatccaacctggtcaaacattttcagttctagcatgctacaatggttcaccatctggtgtttatcagtgtgccatgagacctaatcataccattaaaggttctttccttaatggatcatgtggtagtgttggttttaacattgattatgattgcgtgtctttctgctatatgcatcatatggagcttccaacaggagtacacgctggtactgacttagaaggtaaattctatggtccatttgttgacagacaaactgcacaggctgcaggtacagacacaaccataacattaaatgttttggcatggctgtatgctgctgttatcaatggtgataggtggtttcttaatagattcaccactactttgaatgactttaaccttgtggcaatgaagtacaactatgaacctttgacacaagatcatgttgacatattgggacctctttctgctcaaacaggaattgccgtcttagatatgtgtgctgctttgaaagagctgctgcagaatggtatgaatggtcgtactatccttggtagcactattttagaagatgagtttacaccatttgatgttgttagacaatgctctggtgttaccttccaaggtaagttcaagaaaattgttaagggcactcatcattggatgcttttaactttcttgacatcactattgattcttgttcaaagtacacagtggtcactgtttttctttgtttacgagaatgctttcttgccatttactcttggtattatggcaattgctgcatgtgctatgctgcttgttaagcataagcacgcattcttgtgcttgtttctgttaccttctcttgcaacagttgcttactttaatatggtctacatgcctgctagctgggtgatgcgtatcatgacatggcttgaattggctgacactagcttgtctggttataggcttaaggattgtgttatgtatgcttcagctttagttttgcttattctcatgacagctcgcactgtttatgatgatgctgctagacgtgtttggacactgatgaatgtcattacacttgtttacaaagtctactatggtaatgctttagatcaagctatttccatgtgggccttagttatttctgtaacctctaactattctggtgtcgttacgactatcatgtttttagctagagctatagtgtttgtgtgtgttgagtattacccattgttatttattactggcaacaccttacagtgtatcatgcttgtttattgtttcttaggctattgttgctgctgctactttggccttttctgtttactcaaccgttacttcaggcttactcttggtgtttatgactacttggtctctacacaagaatttaggtatatgaactcccaggggcttttgcctcctaagagtagtattgatgctttcaagcttaacattaagttgttgggtattggaggtaaaccatgtatcaaggttgctactgtacagtctaaaatgtctgacgtaaagtgcacatctgtggtactgctctcggttcttcaacaacttagagtagagtcatcttctaaattgtgggcacaatgtgtacaactccacaatgatattcttcttgcaaaagacacaactgaagctttcgagaagatggtttctcttttgtctgttttgctatccatgcagggtgctgtagacattaataggttgtgcgaggaaatgctcgataaccgtgctactcttcaggctattgcttcagaatttagttctttaccatcatatgccgcttatgccactgcccaggaggcctatgagcaggctgtagctaatggtgattctgaagtcgttctcaaaaagttaaagaaatctttgaatgtggctaaatctgagtttgaccgtgatgctgccatgcaacgcaagttggaaaagatggcagatcaggctatgacccaaatgtacaaacaggcaagatctgaggacaagagggcaaaagtaactagtgctatgcaaacaatgctcttcactatgcttaggaagcttgataatgatgcacttaacaacattatcaacaatgcgcgtgatggttgtgttccactcaacatcataccattgactacagcagccaaactcatggttgttgtccctgattatggtacctacaagaacacttgtgatggtaacacctttacatatgcatctgcactctgggaaatccagcaagttgttgatgcggatagcaagattgttcaacttagtgaaattaacatggacaattcaccaaatttggcttggcctcttattgttacagctctaagagccaactcagctgttaaactacagaataatgaactgagtccagtagcactacgacagatgtcctgtgcggctggtaccacacaaacagcttgtactgatgacaatgcacttgcctactataacaattcgaagggaggtaggtttgtgctggcattactatcagaccaccaagatctcaaatgggctagattccctaagagtgatggtacaggtacaatttacacagaactggaaccaccttgtaggtttgttacagacacaccaaaagggcctaaagtgaaatacttgtacttcatcaaaggcttaaacaacctaaatagaggtatggtgctgggcagtttagctgctacagtacgtcttcaggctggaaatgctacagaagtacctgccaattcaactgtgctttccttctgtgcttttgcagtagaccctgctaaagcatataaggattacctagcaagtggaggacaaccaatcaccaactgtgtgaagatgttgtgtacacacactggtacaggacaggcaattactgtaacaccagaagctaacatggaccaagagtcctttggtggtgcttcatgttgtctgtattgtagatgccacattgaccatccaaatcctaaaggattctgtgacttgaaaggtaagtacgtccaaatacctaccacttgtgctaatgacccagtgggttttacacttagaaacacagtctgtaccgtctgcggaatgtggaaaggttatggctgtagttgtgaccaactccgcgaacccttgatgcagtctgcggatgcatcaacgtttttaaacgggtttgcggtgtaagtgcagcccgtcttacaccgtgcggcacaggcactagtactgatgtcgtctacagggcttttgatatttacaacgaaaaagttgctggttttgcaaagttcctaaaaactaattgctgtcgcttccaggagaaggatgaggaaggcaatttattagactcttactttgtagttaagaggcatactatgtctaactaccaacatgaagagactatttataacttggttaaagattgtccagcggttgctgtccatgactttttcaagtttagagtagatggtgacatggtaccacatatatcacgtcagcgtctaactaaatacacaatggctgatttagtctatgctctacgtcattttgatgagggtaattgtgatacattaaaagaaatactcgtcacatacaattgctgtgatgatgattatttcaataagaaggattggtatgacttcgtagagaatcctgacatcttacgcgtatatgctaacttaggtgagcgtgtacgccaatcattattaaagactgtacaattctgcgatgctatgcgtgatgcaggcattgtaggcgtactgacattagataatcaggatcttaatgggaactggtacgatttcggtgatttcgtacaagtagcaccaggctgcggagttcctattgtggattcatattactcattgctgatgcccatcctcactttgactagggcattggctgctgagtcccatatggatgctgatctcgcaaaaccacttattaagtgggatttgctgaaatatgattttacggaagagagactttgtctcttcgaccgttattttaaatattgggaccagacataccatcccaattgtattaactgtttggatgataggtgtatccttcattgtgcaaactttaatgtgttattttctactgtgtttccacctacaagttttggaccactagtaagaaaaatatttgtagatggtgttccttttgttgtttcaactggataccattttcgtgagttaggagtcgtacataatcaggatgtaaacttacatagctcgcgtctcagtttcaaggaacttttagtgtatgctgctgatccagctatgcatgcagcttctggcaatttattgctagataaacgcactacatgcttttcagtagctgcactaacaaacaatgttgcttttcaaactgtcaaacccggtaattttaataaagacttttatgactttgctgtgtctaaaggtttctttaaggaaggaagttctgttgaactaaaacacttcttctttgctcaggatggcaacgctgctatcagtgattatgactattatcgttataatctgccaacaatgtgtgatatcagacaactcctattcgtagttgaagttgttgataaatactttgattgttacgatggtggctgtattaatgccaaccaagtaatcgttaacaatctggataaatcagctggtttcccatttaataaatggggtaaggctagactttattatgactcaatgagttatgaggatcaagatgcacttttcgcgtatactaagcgtaatgtcatccctactataactcaaatgaatcttaagtatgccattagtgcaaagaatagagctcgcaccgtagctggtgtctctatctgtagtactatgacaaatagacagtttcatcagaaattattgaagtcaatagccgccactagaggagctactgtggtaattggaacaagcaagttttacggtggctggcataatatgttaaaaactgtttacagtgatgtagaaactccacaccttatgggttgggattatccaaaatgtgacagagccatgcctaacatgcttaggataatggcctctcttgttcttgctcgcaaacataacacttgctgtaacttatcacaccgtttctacaggttagctaacgagtgtgcgcaagtattaagtgagatggtcatgtgtggcggctcactatatgttaaaccaggtggaacatcatccggtgatgctacaactgcttatgctaatagtgtctttaacatttgtcaagctgttacagccaatgtaaatgcacttctttcaactgatggtaataagatagctgacaagtatgtccgcaatctacaacacaggctctatgagtgtctctatagaaatagggatgttgatcatgaattcgtggatgagttttacgcttacctgcgtaaacatttctccatgatgattctttctgatgatgccgttgtgtgctataacagtaactatgcggctcaaggtttagtagctagcattaagaactttaaggcagttctttattatcaaaataatgtgttcatgtctgaggcaaaatgttggactgagactgaccttactaaaggacctcacgaattttgctcacagcatacaatgctagttaaacaaggagatgattacgtgtacctgccttacccagatccatcaagaatattaggcgcaggctgttttgtcgatgatattgtcaaaacagatggtacacttatgattgaaaggttcgtgtcactggctattgatgcttacccacttacaaaacatcctaatcaggagtatgctgatgtctttcacttgtatttacaatacattagaaagttacatgatgagcttactggccacatgttggacatgtattccgtaatgctaactaatgataacacctcacggtactgggaacctgagttttatgaggctatgtacacaccacatacagtcttgcaggctgtaggtgcttgtgtattgtgcaattcacagacttcacttcgttgcggtgcctgtattaggagaccattcctatgttgcaagtgctgctatgaccatgtcatttcaacatcacacaaattagtgttgtctgttaatccctatgtttgcaatgccccaggttgtgatgtcactgatgtgacacaactgtatctaggaggtatgagctattattgcaagtcacataagcctcccattagttttccattatgtgctaatggtcaggtttttggtttatacaaaaacacatgtgtaggcagtgacaatgtcactgacttcaatgcgatagcaacatgtgattggactaatgctggcgattacatacttgccaacacttgtactgagagactcaagcttttcgcagcagaaacgctcaaagccactgaggaaacatttaagctgtcatatggtattgctactgtacgcgaagtactctctgacagagaattgcatctttcatgggaggttggaaaacctagaccaccattgaacagaaactatgtctttactggttaccgtgtaactaaaaatagtaaagtacagattggagagtacacctttgaaaaaggtgactatggtgatgctgttgtgtacagaggtactacgacatacaagttgaatgttggtgattactttgtgttgacatctcacactgtaatgccacttagtgcacctactctagtgccacaagagcactatgtgagaattactggcttgtacccaacactcaacatctcagatgagttttctagcaatgttgcaaattatcaaaaggtcggcatgcaaaagtactctacactccaaggaccacctggtactggtaagagtcattttgccatcggacttgctctctattacccatctgctcgcatagtgtatacggcatgctctcatgcagctgttgatgccctatgtgaaaaggcattaaaatatttgcccatagataaatgtagtagaatcatacctgcgcgtgcgcgcgtagagtgttttgataaattcaaagtgaattcaacactagaacagtatgttttctgcactgtaaatgcattgccagaaacaactgctgacattgtagtctttgatgaaatctctatggctactaattatgacttgagtgttgtcaatgctagacttcgtgcaaaacactacgtctatattggcgatcctgctcaattaccagccccccgcacattgctgactaaaggcacactagaaccagaatattttaattcagtgtgcagacttatgaaaacaataggtccagacatgttccttggaacttgtcgccgttgtcctgctgaaattgttgacactgtgagtgctttagtttatgacaataagctaaaagcacacaaggataagtcagctcaatgcttcaaaatgttctacaaaggtgttattacacatgatgtttcatctgcaatcaacagacctcaaataggcgttgtaagagaatttcttacacgcaatcctgcttggagaaaagctgtttttatctcaccttataattcacagaacgctgtagcttcaaaaatcttaggattgcctacgcagactgttgattcatcacagggttctgaatatgactatgtcatattcacacaaactactgaaacagcacactcttgtaatgtcaaccgcttcaatgtggctatcacaagggcaaaaattggcattttgtgcataatgtctgatagagatctttatgacaaactgcaatttacaagtctagaaataccacgtcgcaatgtggctacattacaagcagaaaatgtaactggactttttaaggactgtagtaagatcattactggtcttcatcctacacaggcacctacacacctcagcgttgatataaagttcaagactgaaggattatgtgttgacataccaggcataccaaaggacatgacctaccgtagactcatctctatgatgggtttcaaaatgaattaccaagtcaatggttaccctaatatgtttatcacccgcgaagaagctattcgtcacgttcgtgcgtggattggctttgatgtagagggctgtcatgcaactagagatgctgtgggtactaacctacctctccagctaggattttctacaggtgttaacttagtagctgtaccgactggttatgttgacactgaaaataacacagaattcaccagagttaatgcaaaacctccaccaggtgaccagtttaaacatcttataccactcatgtataaaggcttgccctggaatgtagtgcgtattaagatagtacaaatgctcagtgatacactgaaaggattgtcagacagagtcgtgttcgtcctttgggcgcatggctttgagcttacatcaatgaagtactttgtcaagattggacctgaaagaacgtgttgtctgtgtgacaaacgtgcaacttgcttttctacttcatcagatacttatgcctgctggaatcattctgtgggttttgactatgtctataacccatttatgattgatgttcagcagtggggctttacgggtaaccttcagagtaaccatgaccaacattgccaggtacatggaaatgcacatgtggctagttgtgatgctatcatgactagatgtttagcagtccatgagtgctttgttaagcgcgttgattggtctgttgaataccctattataggagatgaactgagggttaattctgcttgcagaaaagtacaacacatggttgtgaagtctgcattgcttgctgataagtttccagttcttcatgacattggaaatccaaaggctatcaagtgtgtgcctcaggctgaagtagaatggaagttctacgatgctcagccatgtagtgacaaagcttacaaaatagaggagctcttctattcttatgctacacatcacgataaattcactgatggtgtttgtttgttttggaattgtaacgttgatcgttacccagccaatgcaattgtgtgtaggtttgacacaagagtcttgtcaaacttgaacttaccaggctgtgatggtggtagtttgtatgtgaataagcatgcattccacactccagctttcgataaaagtgcatttactaatttaaagcaattgcctttcttttactattctgatagtccttgtgagtctcatggcaaacaagtagtgtcggatattgattatgttccactcaaatctgctacgtgtattacacgatgcaatttaggtggtgctgtttgcagacaccatgcaaatgagtaccgacagtacttggatgcatataatatgatgatttctgctggatttagcctatggatttacaaacaatttgatacttataacctgtggaatacatttaccaggttacagagtttagaaaatgtggcttataatgttgttaataaaggacactttgatggacacgccggcgaagcacctgtttccatcattaataatgctgtttacacaaaggtagatggtattgatgtggagatctttgaaaataagacaacacttcctgttaatgttgcatttgagctttgggctaagcgtaacattaaaccagtgccagagattaagatactcaataatttgggtgttgatatcgctgctaatactgtaatctgggactacaaaagagaagccccagcacatgtatctacaataggtgtctgcacaatgactgacattgccaagaaacctactgagagtgcttgttcttcacttactgtcttgtttgatggtagagtggaaggacaggtagacctttttagaaacgcccgtaatggtgttttaataacagaaggttcagtcaaaggtctaacaccttcaaagggaccagcacaagctagcgtcaatggagtcacattaattggagaatcagtaaaaacacagtttaactactttaagaaagtagacggcattattcaacagttgcctgaaacctactttactcagagcagagacttagaggattttaagcccagatcacaaatggaaactgactttctcgagctcgctatggatgaattcatacagcgatataagctcgagggctatgccttcgaacacatcgtttatggagatttcagtcatggacaacttggcggtcttcatttaatgataggcttagccaagcgctcacaagattcaccacttaaattagaggattttatccctatggacagcacagtgaaaaattacttcataacagatgcgcaaacaggttcatcaaaatgtgtgtgttctgtgattgatcttttacttgatgactttgtcgagataataaagtcacaagatttgtcagtgatttcaaaagtggtcaaggttacaattgactatgctgaaatttcattcatgctttggtgtaaggatggacatgttgaaaccttctacccaaaactacaagcaagtcaagcgtggcaaccaggtgttgcgatgcctaacttgtacaagatgcaaagaatgcttcttgaaaagtgtgaccttcagaattatggtgaaaatgctgttataccaaaaggaataatgatgaatgtcgcaaagtatactcaactgtgtcaatacttaaatacacttactttagctgtaccctacaacatgagagttattcactttggtgctggctctgataaaggagttgcaccaggtacagctgtgctcagacaatggttgccaactggcacactacttgtcgattcagatcttaatgacttcgtctccgacgcagattctactttaattggagactgtgcaacagtacatacggctaataaatgggaccttattattagcgatatgtatgaccctaggaccaaacatgtgacaaaagagaatgactctaaagaagggtttttcacttatctgtgtggatttataaagcaaaaactagccctgggtggttctatagctgtaaagataacagagcattcttggaatgctgacctttacaagcttatgggccatttctcatggtggacagcttttgttacaaatgtaaatgcatcatcatcggaagcatttttaattggggctaactatcttggcaagccgaaggaacaaattgatggctataccatgcatgctaactacattttctggaggaacacaaatcctatccagttgtcttcctattcactctttgacatgagcaaatttcctcttaaattaagaggaactgctgtaatgtctcttaaggagaatcaaatcaatgatatgatttattctcttctggaaaaaggtaggcttatcattagagaaaacaacagagttgtggtttcaagtgatattcttgttaacaactaaacgaacatgtttattttcttattatttcttactctcactagtggtagtgaccttgaccggtgcaccacttttgatgatgttcaagctcctaattacactcaacatacttcatctatgaggggggtttactatcctgatgaaatttttagatcagacactctttatttaactcaggatttatttcttccattttattctaatgttacagggtttcatactattaatcatacgtttggcaaccctgtcataccttttaaggatggtatttattttgctgccacagagaaatcaaatgttgtccgtggttgggtttttggttctaccatgaacaacaagtcacagtcggtgattattattaacaattctactaatgttgttatacgagcatgtaactttgaattgtgtgacaaccctttctttgctgtttctaaacccatgggtacacagacacatactatgatattcgataatgcatttaattgcactttcgagtacatatctgatgccttttcgcttgatgtttcagaaaagtcaggtaattttaaacacttacgagagtttgtgtttaaaaataaagatgggtttctctatgtttataagggctatcaacctatagatgtagttcgtgatctaccttctggttttaacactttgaaacctatttttaagttgcctcttggtattaacattacaaattttagagccattcttacagccttttcacctgctcaagacatttggggcacgtcagctgcagcctattttgttggctatttaaagccaactacatttatgctcaagtatgatgaaaatggtacaatcacagatgctgttgattgttctcaaaatccacttgctgaactcaaatgctctgttaagagctttgagattgacaaaggaatttaccagacctctaatttcagggttgttccctcaggagatgttgtgagattccctaatattacaaacttgtgtccttttggagaggtttttaatgctactaaattcccttctgtctatgcatgggagagaaaaaaaatttctaattgtgttgctgattactctgtgctctacaactcaacatttttttcaacctttaagtgctatggcgtttctgccactaagttgaatgatctttgcttctccaatgtctatgcagattcttttgtagtcaagggagatgatgtaagacaaatagcgccaggacaaactggtgttattgctgattataattataaattgccagatgatttcatgggttgtgtccttgcttggaatactaggaacattgatgctacttcaactggtaattataattataaatataggtatcttagacatggcaagcttaggccctttgagagagacatatctaatgtgcctttctcccctgatggcaaaccttgcaccccacctgctcttaattgttattggccattaaatgattatggtttttacaccactactggcattggctaccaaccttacagagttgtagtactttcttttgaacttttaaatgcaccggccacggtttgtggaccaaaattatccactgaccttattaagaaccagtgtgtcaattttaattttaatggactcactggtactggtgtgttaactccttcttcaaagagatttcaaccatttcaacaatttggccgtgatgtttctgatttcactgattccgttcgagatcctaaaacatctgaaatattagacatttcaccttgctcttttgggggtgtaagtgtaattacacctggaacaaatgcttcatctgaagttgctgttctatatcaagatgttaactgcactgatgtttctacagcaattcatgcagatcaactcacaccagcttggcgcatatattctactggaaacaatgtattccagactcaagcaggctgtcttataggagctgagcatgtcgacacttcttatgagtgcgacattcctattggagctggcatttgtgctagttaccatacagtttctttattacgtagtactagccaaaaatctattgtggcttatactatgtctttaggtgctgatagttcaattgcttactctaataacaccattgctatacctactaacttttcaattagcattactacagaagtaatgcctgtttctatggctaaaacctccgtagattgtaatatgtacatctgcggagattctactgaatgtgctaatttgcttctccaatatggtagcttttgcacacaactaaatcgtgcactctcaggtattgctgctgaacaggatcgcaacacacgtgaagtgttcgctcaagtcaaacaaatgtacaaaaccccaactttgaaatattttggtggttttaatttttcacaaatattacctgaccctctaaagccaactaagaggtcttttattgaggacttgctctttaataaggtgacactcgctgatgctggcttcatgaagcaatatggcgaatgcctaggtgatattaatgctagagatctcatttgtgcgcagaagttcaatggacttacagtgttgccacctctgctcactgatgatatgattgctgcctacactgctgctctagttagtggtactgccactgctggatggacatttggtgctggcgctgctcttcaaataccttttgctatgcaaatggcatataggttcaatggcattggagttacccaaaatgttctctatgagaaccaaaaacaaatcgccaaccaatttaacaaggcgattagtcaaattcaagaatcacttacaacaacatcaactgcattgggcaagctgcaagacgttgttaaccagaatgctcaagcattaaacacacttgttaaacaacttagctctaattttggtgcaatttcaagtgtgctaaatgatatcctttcgcgacttgataaagtcgaggcggaggtacaaattgacaggttaattacaggcagacttcaaagccttcaaacctatgtaacacaacaactaatcagggctgctgaaatcagggcttctgctaatcttgctgctactaaaatgtctgagtgtgttcttggacaatcaaaaagagttgacttttgtggaaagggctaccaccttatgtccttcccacaagcagccccgcatggtgttgtcttcctacatgtcacgtatgtgccatcccaggagaggaacttcaccacagcgccagcaatttgtcatgaaggcaaagcatacttccctcgtgaaggtgtttttgtgtttaatggcacttcttggtttattacacagaggaacttcttttctccacaaataattactacagacaatacatttgtctcaggaaattgtgatgtcgttattggcatcattaacaacacagtttatgatcctctgcaacctgagctcgactcattcaaagaagagctggacaagtacttcaaaaatcatacatcaccagatgttgatcttggcgacatttcaggcattaacgcttctgtcgtcaacattcaaaaagaaattgaccgcctcaatgaggtcgctaaaaatttaaatgaatcactcattgaccttcaagaattgggaaaatatgagcaatatattaaatggccttggtatgtttggctcggcttcattgctggactaattgccatcgtcatggttacaatcttgctttgttgcatgactagttgttgcagttgcctcaagggtgcatgctcttgtggttcttgctgcaagtttgatgaggatgactctgagccagttctcaagggtgtcaaattacattacacataaacgaacttatggatttgtttatgagattttttactcttggatcaattactgcacagccagtaaaaattgacaatgcttctcctgcaagtactgttcatgctacagcaacgataccgctacaagcctcactccctttcggatggcttgttattggcgttgcatttcttgctgtttttcagagcgctaccaaaataattgcgctcaataaaagatggcagctagccctttataagggcttccagttcatttgcaatttactgctgctatttgttaccatctattcacatcttttgcttgtcgctgcaggtatggaggcgcaatttttgtacctctatgccttgatatattttctacaatgcatcaacgcatgtagaattattatgagatgttggctttgttggaagtgcaaatccaagaacccattactttatgatgccaactactttgtttgctggcacacacataactatgactactgtataccatataacagtgtcacagatacaattgtcgttactgaaggtgacggcatttcaacaccaaaactcaaagaagactaccaaattggtggttattctgaggataggcactcaggtgttaaagactatgtcgttgtacatggctatttcaccgaagtttactaccagcttgagtctacacaaattactacagacactggtattgaaaatgctacattcttcatctttaacaagcttgttaaagacccaccgaatgtgcaaatacacacaatcgacggctcttcaggagttgctaatccagcaatggatccaatttatgatgagccgacgacgactactagcgtgcctttgtaagcacaagaaagtgagtacgaacttatgtactcattcgtttcggaagaaacaggtacgttaatagttaatagcgtacttctttttcttgctttcgtggtattcttgctagtcacactagccatccttactgcgcttcgattgtgtgcgtactgctgcaatattgttaacgtgagtttagtaaaaccaacggtttacgtctactcgcgtgttaaaaatctgaactcttctgaaggagttcctgatcttctggtctaaacgaactaactattattattattctgtttggaactttaacattgcttatcatggcagacaacggtactattaccgttgaggagcttaaacaactcctggaacaatggaacctagtaataggtttcctattcctagcctggattatgttactacaatttgcctattctaatcggaacaggtttttgtacataataaagcttgttttcctctggctcttgtggccagtaacacttgcttgttttgtgcttgctgctgtctacagaattaattgggtgactggcgggattgcgattgcaatggcttgtattgtaggcttgatgtggcttagctacttcgttgcttccttcaggctgtttgctcgtacccgctcaatgtggtcattcaacccagaaacaaacattcttctcaatgtgcctctccgggggacaattgtgaccagaccgctcatggaaagtgaacttgtcattggtgctgtgatcattcgtggtcacttgcgaatggccggacaccccctagggcgctgtgacattaaggacctgccaaaagagatcactgtggctacatcacgaacgctttcttattacaaattaggagcgtcgcagcgtgtaggcactgattcaggttttgctgcatacaaccgctaccgtattggaaactataaattaaatacagaccacgccggtagcaacgacaatattgctttgctagtacagtaagtgacaacagatgtttcatcttgttgacttccaggttacaatagcagagatattgattatcattatgaggactttcaggattgctatttggaatcttgacgttataataagttcaatagtgagacaattatttaagcctctaactaagaagaattattcggagttagatgatgaagaacctatggagttagattatccataaaacgaacatgaaaattattctcttcctgacattgattgtatttacatcttgcgagctatatcactatcaggagtgtgttagaggtacgactgtactactaaaagaaccttgcccatcaggaacatacgagggcaattcaccatttcaccctcttgctgacaataaatttgcactaacttgcactagcacacactttgcttttgcttgtgctgacggtactcgacatacctatcagctgcgtgcaagatcagtttcaccaaaacttttcatcagacaagaggaggttcaacaagagctctactcgccactttttctcattgttgctgctctagtatttttaatactttgcttcaccattaagagaaagacagaatgaatgagctcactttaattgacttctatttgtgctttttagcctttctgctattccttgttttaataatgcttattatattttggttttcactcgaaatccaggatctagaagaaccttgtaccaaagtctaaacgaacatgaaacttctcattgttttgacttgtatttctctatgcagttgcatatgcactgtagtacagcgctgtgcatctaataaacctcatgtgcttgaagatccttgtaaggtacaacactaggggtaatacttatagcactgcttggctttgtgctctaggaaaggttttaccttttcatagatggcacactatggttcaaacatgcacacctaatgttactatcaactgtcaagatccagctggtggtgcgcttatagctaggtgttggtaccttcatgaaggtcaccaaactgctgcatttagagacgtacttgttgttttaaataaacgaacaaattaaaatgtctgataatggaccccaatcaaaccaacgtagtgccccccgcattacatttggtggacccacagattcaactgacaataaccagaatggaggacgcaatggggcaaggccaaaacagcgccgaccccaaggtttacccaataatactgcgtcttggttcacagctctcactcagcatggcaaggaggaacttagattccctcgaggccagggcgttccaatcaacaccaatagtggtccagatgaccaaattggctactaccgaagagctacccgacgagttcgtggtggtgacggcaaaatgaaagagctcagccccagatggtacttctattacctaggaactggcccagaagcttcacttccctacggcgctaacaaagaaggcatcgtatgggttgcaactgagggagccttgaatacacccaaagaccacattggcacccgcaatcctaataacaatgctgccaccgtgctacaacttcctcaaggaacaacattgccaaaaggcttctacgcagagggaagcagaggcggcagtcaagcctcttctcgctcctcatcacgtagtcgcggtaattcaagaaattcaactcctggcagcagtaggggaaattctcctgctcgaatggctagcggaggtggtgaaactgccctcgcgctattgctgctagacagattgaaccagcttgagagcaaagtttctggtaaaggccaacaacaacaaggccaaactgtcactaagaaatctgctgctgaggcatctaaaaagcctcgccaaaaacgtactgccacaaaacagtacaacgtcactcaagcatttgggagacgtggtccagaacaaacccaaggaaatttcggggaccaagacctaatcagacaaggaactgattacaaacattggccgcaaattgcacaatttgctccaagtgcctctgcattctttggaatgtcacgcattggcatggaagtcacaccttcgggaacatggctgacttatcatggagccattaaattggatgacaaagatccacaattcaaagacaacgtcatactgctgaacaagcacattgacgcatacaaaacattcccaccaacagagcctaaaaaggacaaaaagaaaaagactgatgaagctcagcctttgccgcagagacaaaagaagcagcccactgtgactcttcttcctgcggctgacatggatgatttctccagacaacttcaaaattccatgagtggagcttctgctgattcaactcaggcataaacactcatgatgaccacacaaggcagatgggctatgtaaacgttttcgcaattccgtttacgatacatagtctactcttgtgcagaatgaattctcgtaactaaacagcacaagtaggtttagttaactttaatctcacatagcaatctttaatcaatgtgtaacattagggaggacttgaaagagccaccacattttcatcgaggccacgcggagtacgatcgagggtacagtgaataatgctagggagagctgcctatatggaagagccctaatgtgtaaaattaattttagtagtgctatccccatgtgattttaatagcttcttaggagaatgac

SEQ ID NO: 87 - DNA, 29715 bp, Coronavirus
cctacccaggaaaagccaaccaacctcgatctcttgtagatctgttctctaaacgaactttaaaatctgtgtagctgtcgctcggctgcatgcctagtgcacctacgcagtataaacaataataaattttactgtcgttgacaagaaacgagtaactcgtccctcttctgcagactgcttacggtttcgtccgtgttgcagtcgatcatcagcatacctaggtttcgtccgggtgtgaccgaaaggtaagatggagagccttgttcttggtgtcaacgagaaaacacacgtccaactcagtttgcctgtccttcaggttagagacgtgctagtgcgtggcttcggggactctgtggaagaggccctatcggaggcacgtgaacacctcaaaaatggcacttgtggtctagtagagctggaaaaaggcgtactgccccagcttgaacagccctatgtgtgcattaaacgttctgatgcctaaagcacctatcacggccacaaggtcgttgagctggttgcagaaatggacggcattcagtacggtcgtagcggtataacactgggagtactcgtgccacatgtgggcgaaaccccaattgcataccgcaatgttcttcttcgtaagaacggtaataagggagccggtggtcatagctatggcatcgatctaaagtcttatgacttaggtgacgagcttggcactgatcccattgaagattatgaacaaaactggaacactaagcatggcagtggtgcactccgtgaactcactcgtgagctcaatggaggtgcagtcactcgctatgtcgacaacaatttctgtggcccagatgggtaccctcttgattgcatcaaagattttctcgcacgcgcgggcaagtcaatgtgcactctttccgaacaacttgattacatcgagtcgaagagaggtgtctactgctgccgtgaccatgagcatgaaattgcctggttcactgagcgctctgataagagctacgagcaccagacacccttcgaaattaagagtgccaagaaatttgacactttcaaaggggaatgcccaaagtttgtgtttcctcttaactcaaaagtcaaagtcattcaaccacgtgttgaaaagaaaaagactgagggtttcatggggcgtatacgctctgtgtaccctgttgcatctccacaggagtgtaacaatatgcacttgtctaccttgatgaaatgtaatcattgcgatgaagtttcatggcagacgtgcgactttctgaaagccacttgtgaacattgtggcactgaaaatttagttattgaaggacctactacatgtgggtacctacctactaatgctgtagtgaaaatgccatgtcctgcctgtmaagacccagagattggacctgagcatagtgttgcagattatcacaaccactcaaacattgaaactcgactccgcaagggaggtaggactagatgttttggaggctgtgtgtttgcctatgttggctgctataataagcgtgcctactgggttcctcgtgctagtgctgatattggctcaggccatactggcattactggtgacaatgtggagaccttgaatgaggatctccttgagatactgagtcgtgaacgtgttaacattaacattgttggcgattttcatttgaatgaagaggttgccatcattttggcatctttctctgcttctacaagtgcctttattgacactataaagagtcttgattacaagtctttcaaaaccattgttgagtcctgcggtaactataaagttaccaagggaaagcccgtaaaaggtgcttggaacattggacaacagagatcagttttaacaccactgtgtggttttccctcacaggctgctggtgttatcagatcaatttttgcgcgcacacttgatgcagcaaaccactcaattcctgatttgcaaagagcagctgtcaccatacttgatggtatttctgaacagtcattacgtcttgtcgacgccatggtttatacttcagacctgctcaccaacagtgtcattattatggcatatgtaactggtggtcttgtacaacagacttctcagtggttgtctaatcttttgggcactactgttgaaaaactcaggcctatctttgaatggattgaggcgaaacttagtgcaggagttgaatttctcaaggatgcttgggagattctcaaatttctcattacaggtgtttttgacatcgtcaagggtcaaatacaggttgcttcagataacatcaaggattgtgtaaaatgcttcattgatgttgttaacaaggcactcgaaatgtgcattgatcaagtcactatcgctggcgcaaagttgcgatcactcaacttaggtgaagtcttcatcgctcaaagcaagggactttaccgtcagtgtatacgtggcaaggagcagctgcaactactcatgcctcttaaggcaccaaaagaagtaacctttcttgaaggtgattcacatgacacagtacttacctctgaggaggttgttctcaagaacggtgaactcgaagcactcgagacgcccgttgatagcttcacaaatggagctatcgttggcacaccagtctgtgtaaatggcctcatgctcttagagattaaggacaaagaacaatactgcgcattgtctcctggtttactggctacaaacaatgtctttcgcttaaaagggggtgcaccaattaaaggtgtaacctttggagaagatactgtttgggaagttcaaggttacaagaatgtgagaatcacatttgagcttgatgaacgtgttgacaaagtgcttaatgaaaagtgctctgtctacactgttgaatccggtaccgaagttactgagtttgcatgtgttgtagcagaggctgttgtgaagactttacaaccagtttctgatctccttaccaacatgggtattgatcttgatgagtggagtgtagctacattctacttatttgatgatgctggtgaagaaaacttttcatcacgtatgtattgttccttttaccctccagatgaggaagaagaggacgatgcagagtgtgaggaagaagaaattgatgaaacctgtgaacatgagtacggtacagaggatgattatcaaggtctccctctggaatttggtgcctcagctgaaacagttcgagttgaggaagaagaagaggaagactggctggatgatactactgagcaatcagagattgagccagaaccagaacctacacctgaagaaccagttaatcagtttactggttatttaaaacttactgacaatgttgccattaaatgtgttgacatcgttaaggaggcacaaagtgctaatcctatggtgattgtaaatgctgctaacatacacctgaaacatggtggtggtgtagcaggtgcactcaacaaggcaaccaatggtgccatgcaaaaggagagtgatgattacattaagctaaatggccctcttacagtaggagggtcttgtttgctttctggacataatcttgctaagaagtgtctgcatgttgttggacctaacctaaatgcaggtgaggacatccagcttcttaaggcagcatatgaaaatttcaattcacaggacatcttacttgcaccattgttgtcagcaggcatatttggtgctaaaccacttcagtctttacaagtgtgcgtgcagacggttcgtacacaggtttatattgcagtcaatgacaaagctctttatgagcaggttgtcatggattatcttgataacctgaagcctagagtggaagcacctaaacaagaggagccaccaaacacagaagattccaaaactgaggagaaatctgtcgtacagaagcctgtcgatgtgaagccaaaaattaaggcctgcattgatgaggttaccacaacactggaagaaactaagtttcttaccaataagttactcttgtttgctgatatcaatggtaagctttaccatgattctcagaacatgcttagaggtgaagatatgtctttccttgagaaggatgcaccttacatggtaggtgatgttatcactagtggtgatatcacttgtgttgtaataccctccaaaaaggctggtggcactactgagatgctctcaagagctttgaagaaagtgccagttgatgagtatataaccacgtaccctggacaaggatgtgctggttatacacttgaggaagctaagactgctcttaagaaatgcaaatctgcattttatgtactaccttcagaagcacctaatgctaaggaagagattctaggaactgtatcctggaatttgagagaaatgcttgctcatgctgaagagacaagaaaattaatgcctatatgcatggatgttagagccataatggcaaccatccaacgtaagtataaaggaattaaaattcaagagggcatcgttgactatggtgtccgattcttcttttatactagtaaagagcctgtagcttctattattacgaagctgaactctctaaatgagccgcttgtcacaatgccaattggttatgtgacacatggttttaatcttgaagaggctgcgcgctgtatgcgttctcttaaagctcctgccgtagtgtcagtatcatcaccagatgctgttactacatataatggatacctcacttcgtcatcaaagacatctgaggagcactttgtagaaacagtttctttggctggctcttacagagattggtcctattcaggacagcgtacagagttaggtgttgaatttcttaagcgtggtgacaaaattgtgtaccacactctggagagccccgtcgagtttcatcttgacggtgaggttctttcacttgacaaactaaagagtctcttatccctgcgggaggttaagactataaaagtgttcacaactgtggacaacactaatctccacacacagcttgtggatatgtctatgacatatggacagcagtttggtccaacatacttggatggtgctgatgttacaaaaattaaacctcatgtaaatcatgagggtaagactttctttgtactacctagtgatgacacactacgtagtgaagctttcgagtactaccatactcttgatgagagttttcttggtaggtacatgtctgctttaaaccacacaaagaaatggaaatttcctcaagttggtggtttaacttcaattaaatgggctgataacaattgttatttgtctagtgttttattagcacttcaacagcttgaagtcaaattcaatgcaccagcacttcaagaggcttattatagagcccgtgctggtgatgctgctaacttttgtgcactcatactcgcttacagtaataaaactgttggcgagcttggtgatgtcagagaaactatgacccatcttctacagcatgctaatttggaatctgcaaagcgagttcttaatgtggtgtgtaaacattgtggtcagaaaactactaccttaacgggtgtagaagctgtgatgtatatgggtactctatcttatgataatcttaagacaggtgtttccattccatgtgtgtgtggtcgtgatgctacacaatatctagtacaacaagagtcttcttttgttatgatgtctgcaccacctgctgagtataaattacagcaaggtacattcttatgtgcgaatgagtacactggtaactatcagtgtggtcattacactcatataactgctaaggagaccctctatcgtattgacggagctcaccttacaaagatgtcagagtacaaaggaccagtgactgatgttttctacaaggaaacatcttacactacaaccatcaagcctgtgtcgtataaactcgatggagttacttacacagagattgaaccaaaattggatgggtattataaaaaggataatgcttactatacagagcagcctatagaccttgtaccaactcaaccattaccaaatgcgagttttgataatttcaaactcacatgttctaacacaaaatttgctgatgatttaaatcaaatgacaggcttcacaaagccagcttcacgagagctatctgtcacattcttcccagacttgaatggcgatgtagtggctattgactatagacactattcagcgagtttcaagaaaggtgctaaattactgcataagccaattgtttggcacattaaccaggctacaaccaagacaacgttcaaaccaaacacttggtgtttacgttgtctttggagtacaaagccagtagatacttcaaattcatttgaagttctggcagtagaagacacacaaggaatggacaatcttgcttgtgaaagtcaacaacccacctctgaagaagtagtggaaaatcctaccatacagaaggaagtcatagagtgtgacgtgaaaactaccgaagttgtaggcaatgtcatacttaaaccatcagatgaaggtgttaaagtaacacaagagttaggtcatgaggatcttatggctgcttatgtggaaaacacaagcattaccattaagaaacctaatgagctttcactagccttaggtttaaaaacaattgccactcatggtattgctgcaattaatagtgttccttggagtaaaattttggcttatgtcaaaccattcttaggacaagcagcaattacaacatcaaattgcgctaagagattagcacaacgtgtgtttaacaattatatgccttatgtgtttacattattgttccaattgtgtacttttactaaaagtaccaattctagaattagagcttcactacctacaactattgctaaaaatagtgttaagagtgttgctaaattatgtttggatgccggcattaattatgtgaagtcacccaaattttctaaattgttcacaatcgctatgtggctattgttgttaagtatttgcttaggttctctaatctgtgtaactgctgcttttggtgtactcttatctaattttggtgctccttcttattgtaatggcgttagagaattgtatcttaattcgtctaacgttactactatggatttctgtgaaggttcttttccttgcagcatttgtttaagtggattagactcccttgattcttatccagctcttgaaaccattcaggtgacgatttcatcgtacaagctagacttgacaattttaggtctggccgctgagtgggttttggcatatatgttgttcacaaaattcttttatttattaggtctttcagctataatgcaggtgttctttggctattttgctagtcatttcatcagcaattcttggctcatgtggtttatcattagtattgtacaaatggcacccgtttctgcaatggttaggatgtacatcttctttgcttctttctactacatatggaagagctatgttcatatcatggatggttgcacctcttcgacttgcatgatgtgctataagcgcaatcgtgccacacgcgttgagtgtacaactattgttaatggcatgaagagatctttctatgtctatgcaaatggaggccgtggcttctgcaagactcacaattggaattgtctcaattgtgacacattttgcactggtagtacattcattagtgatgaagttgctcgtgatttgtcactccagtttaaaagaccaatcaaccatactgaccagtcatcgtatatagttgatagtgttgctgtgaaaaatggcgcgcttcacatctactttgacaaggctggtcaaaagacatatgagagacatccgctctcccattttgtcaatttagacaatttgagagctaacaacactaaaggttcactgcctattaatgtcatagtttttgatggcaagtccaaatgcgacgagtctgcttctaagtctgcttctgtgtactacagtcagctgatgtgccaacctattctgttgcttgaccaagctcttgtatcagacgttggagatagtactgaagtttccgttaagatgtttgatgcttatgtcgacaccttttcagcaacttttagtgttcctatggaaaaacttaaggcacttgttgctacagctcacagcgagttagcaaagggtgtagctttagatggtgtcctttctacattcgtgtcagctgcccgacaaggtgttgttgataccgatgttgacacaaaggatgttattgaatgtctcaaactttcacatcactctgacttagaagtgacaggtgacagttgtaacaatttcatgctcacctataataaggttgaaaacatgacgcccagagatcttggcgcatgtattgactgtaatgcaaggcatatcaatgcccaagtagcaaaaagtcacaatgtttcactcatctggaatgtaaaagactacatgtctttatctgaacagctgcgtaaacaaattcgtagtgctgccaagaagaacaacataccttttagactaacttgtgctacaactagacaggttgtcaatgtcataactactaaaatctcactcaagggtggtaagattgttagtacttgttttaaacttatgcttaaggccacattattgtgcgttcttgctgcattggtttgttatatacgttatgccagtacatacattgtcaatccatgatggttacacaaatgaaatcattggttacaaagccattcaggatggtgtcactcgtgacatcatttctactgatgattgttttgcaaataaacatgctggttttgacgcatggtttagccagcgtggtggttcatacaaaaatgacaaaagctgccctgtagtagctgctatcattacaagagagattggtttcatagtgcctggcttaccgggtactgtgctgagagcaatcaatggtgacttcttgcattttctacctcgtgtttttagtgctgttggcaacatttgctacacaccttccaaactcattgagtatagtgattttgctacctctgcttgcgttcttgctgctgagtgtacaatttttaaggatgctatgggcaaacctgtgccatattgttatgacactaatttgctagagggttctatttcttatagtgagcttcgtccagacactcgttatgtgcttatggatggttccatcatacagtttcctaacacttacctggagggttctgttagagtagtaacaacttttgatgctgagtactgtagacatggtacatgcgaaaggtcagaagtaggtatttgcctatctaccagtggtagatgggttcttaataatgagcattacagagctctatcaggagttttctgtggtgttgatgcgatgaatctcatagctaacatctttactcctcttgtgcaacctgtgggtgctttagatgtgtctgctctagtagtggctggtggtattattgccatattggtgacttgtgctgcctactactttatgaaattcagacgtgtttttggtgagtacaaccatgttgttgctgctaatgcacttttgtttttgatgtctttcactatactctgtctggtaccagcttacagctttctgccgggagtctactcagtcttttacttgtacttgacattctatttcaccaatgatgtttcattcttggctcaccttcaatggtttgccatgttttctcctattgtgcctttttggataacagcaatctatgtattctgtatttctctgaagcactgccattggttctttaacaactatcttaggaaaagagtcatgtttaatggagttacatttagtaccttcgaggaggctgctttgtgtacctttttgctcaacaaggaaatgtacctaaaattgcgtagcgagacactgttgccacttacacagtataacaggtatcttgctctatataacaagtacaagtatttcagtggagccttagatactaccagctatcgtgaagcagcttgctgccacttagcaaaggctctaaatgactttagcaactcaggtgctgatgttctctaccaaccaccacagacatcaatcacttctgctgttctgcagagtggttttaggaaaatggcattcccgtcaggcaaagttgaagggtgcatggtacaagtaacctgtggaactacaactcttaatggattgtggttggatgacacagtatactgtccaagacatgtcatttgcacagcagaagacatgcttaatcctaactatgaagatctgctcattcgcaaatccaaccatagctttcttgttcaggctggcaatgttcaacttcgtgttattggccattctatgcaaaattgtctgcttaggcttaaagttgatacttctaaccctaagacacccaagtataaatttgtccgtatccaacctggtcaaacattttcagttctagcatgctacaatggttcaccatctggtgtttatcagtgtgccatgagacctaatcataccattaaaggttctttccttaatggatcatgtggtagtgttggttttaacattgattatgattgcgtgtctttctgctatatgcatcatatggagcttccaacaggagtacacgctggtactgacttagaaggtaaattctatggtccatttgttgacagacaaactgcacaggctgcaggtacagacacaaccataacattaaatgttttggcatggctgtatgctgctgttatcaatggtgataggtggtttcttaatagattcaccactactttgaatgactttaaccttgtggcaatgaagtacaactatgaacctttgacacaagatcatgttgacatattgggacctctttctgctcaaacaggaattgccgtcttagatatgtgtgctgctttgaaagagctgctgcagaatggtatgaatggtcgtactatccttggtagcactattttagaagatgagtttacaccatttgatgttgttagacaatgctctggtgttaccttccaaggtaagttcaagaaaattgttaagggcactcatcattggatgcttttaactttcttgacatcactattgattcttgttcaaagtacacagtggtcactgtttttctttgtttacgagaatgctttcttgccatttactcttggtattatggcaattgctgcatgtgctatgctgcttgttaagcataagcacgcattcttgtgcttgtttctgttaccttctcttgcaacagttgcttactttaatatggtctacatgcctgctagctgggtgatgcgtatcatgacatggcttgaattggctgacactagcttgtctggttataggcttaaggattgtgttatgtatgcttcagctttagttttgcttattctcatgacagctcgcactgtttatgatgatgctgctagacgtgtttggacactgatgaatgtcattacacttgtttacaaagtctactatggtaatgctttagatcaagctatttccatgtgggccttagttatttctgtaacctctaactattctggtgtcgttacgactatcatgtttttagctagagctatagtgtttgtgtgtgttgagtataacccattgttatttattactggcaacaccttacagtgtatcatgcttgtttattgtttcttaggctattgttgctgctgctactttggccttttctgtttactcaaccgttacttcaggcttactcttggtgtttatgactacttggtctctacacaagaatttaggtatatgaactcccaggggcttttgcctcctaagagtagtattgatgctttcaagcttaacattaagttgttgggtattggaggtaaaccatgtatcaaggttgctactgtacagtctaaaatgtctgacgtaaagtgcacatctgtggtactgctctcggttcttcaacaacttagagtagagtcatcttctaaattgtgggcacaatgtgtacaactccacaatgatattcttcttgcaaaagacacaactgaagctttcgagaagatggtttctcttttgtctgttttgctatccatgcagggtgctgtagacattaataggttgtgcgaggaaatgctcgataaccgtgctactcttcaggctattgcttcagaatttagttctttaccatcatatgccgcttatgccactgcccaggaggcctatgagcaggctgtagctaatggtgattctgaagtcgttctcaaaaagttaaagaaatctttgaatgtggctaaatctgagtttgaccgtgatgctgccatgcaacgcaagttggaaaagatggcagatcaggctatgacccaaatgtacaaacaggcaagatctgaggacaagagggcaaaagtaactagtgctatgcaaacaatgctcttcactatgcttaggaagcttgataatgatgcacttaacaacattatcaacaatgcgcgtgatggttgtgttccactcaacatcataccattgactacagcagccaaactcatggttgttgtccctgattatggtacctacaagaacacttgtgatggtaacacctttacatatgcatctgcactctgggaaatccagcaagttgttgatgcggatagcaagcatgttcaacttagtgaaattaacatggacaattcaccaaatttggcttggcctcttattgttacagctctaagagccaactcagctgttaaactacagaataatgaactgagtccagtagcactacgacagatgtcctgtgcggctggtaccacacaaacagcttgtactgatgacaatgcacttgcctactataacaattcgaagggaggtaggtttgtgctggcattactatcagaccaccaagatctcaaatgggctagattccctaagagtgatggtacaggtacaatttacacagaactggaaccaccttgtaggtttgttacagacacaccaaaagggcctaaagtgaaatacttgtacttcatcaaaggcttaaacaacctaaatagaggtatggtgctgggcagtttagctgctacagtacgtcttcaggctggaaatgctacagaagtacctgcccattcagactgtgatttccttctgtgcttttgcagtagaccctggtcaagcatataaggattacctagcaagtggaggacaaccaatcaccaactgtgtgaagatgttgtgtacacacactggtacaggacaggcaattactgtaacaccagaagctaacatggaccaagagtcctttggtggtgcttcatgttgtctgtattgtagatgccacattgaccatccaaatcctaaaggattctgtgacttgaaaggtaagtacgtccaaatacctaccacttgtgctaatgacccagtgggttttacacttagaaacacagtctgtaccgtctgcggaatgtggaaaggttatggctgtagttgtgaccaactccgcgaacccttgatgcagtctgcggatgcatctaacgtttttaaacgggtttgcggtgtaagtgcagcccgtcttacaccgtgcggcacaggcactagtactgatgtctgtctacagggcattttgatatttacaacgaaaaagttgctggttttgcaaagttcctaaaaactaattgctgtcgcttccaggagaaggatgaggaaggcaatttattagactcttactttgtagttaagaggcatactatgtctaactaccaacatgaagagactatttataacttggttaaagattgtccagcggttgctgtccatgactttttcaagtttagagtagatggtgacatggtaccacatatatcacgtcagcgtctaactaaatacacaatggctgatttagtctatgctctacgtcattttgatgagggtaattgtgatacattaaaagaaatactcgtcacatacaattgctgtgatgatgattatttcaataagaaggattggtatgacttcgtagagaatcctgacatcttacgcgtatatgctaacttaggtgagcgtgtacgccaatcattattaaagactgtacaattctgcgatgctatgcgtgatgcaggcattgtaggcgtactgacattagataatcaggatcttaatgggaactggtacgatttcggtgatttcgaacaagtagcaccaggctgcggagttcctattgtggattcatattactcattgctgatgcccatcctcactttgactagggcattggctgctgagtcccatatggatgctgatctcgcaaaaccacttattaagtgggatttgctgaaatatgattttacggaagagagactttgtctcttcgaccgttattttaaatattgggaccagacataccatcccaattgtattaactgtttggatgataggtgtatccttcattgtgcaaactttaatgtgttattttctactgtgtttccacctacaagttttggaccactagtaagaaaaatatttgtagatggtgttccttttgttgtttcaactggataccattttcgtgagttaggagtcgtacataatcaggatgtaaacttacatagctcgcgtctcagtttcaaggaacttttagtgtatgctgctgatccagctatgcatgcagcttctggcaatttattgctagataaacgcactacatgcttttcagtagctgcactaacaaacaatgttgcttttcaaactgtcaaacccggtaattttaataaagacttttatgactttgctgtgtctaaaggtttctttaaggaaggaagttctgttgaactaaaacacttcttctttgctcaggatggcaacgctgctatcagtgattatgactattatcgttataatctgccaacaatgtgtgatatcagacaactcctattcgtagttgaagttgttgataaatactttgattgttacgatggtggctgtattaatgccaaccaagtaatcgttaacaatctggataaatcagctggtttcccatttaataaatggggtaaggctagactttattatgactcaatgagttatgaggatcaagatgcacttttcgcgtatactaagcgtaatgtcatccctactataactctaatgaatcttaagtatgccattagtgcaaagaatagagctcgcaccgtagctggtgtctctatctgtagtactatgacaaatagacagtttcatcagaaattattgaagtcaatagccgccactagaggagctactgtggtaattggaacaagcaagttttacggtggctggcataatatgttaaaaactgtttacagtgatgtagaaactccacaccttatgggttgggattatccaaaatgtgacagagccatgcctaacatgcttaggataatggcctctcttgttcttgctcgcaaacataacacttgctgtaacttatcacaccgtttctacaggttagctaacgagtgtgcgcaagtattaagtgagatggtcatgtgtggcggctcactatatgttaaaccaggtggaacatcatccggtgatgctacaactgcttatgctaatagtgtctttaacatttgtcaagctgttacagccaatgtaaatgcacttctttcaactgatggtaataagatagctgacaagtatgtccgcatctacaacacaggctctatgagtgtctctatatgaaatagggatgttgatcatgaattcgtggatgagttttacgcttacctgcgtaaacatttctccatgatgattctttctgatgatgccgttgtgtgctataacagtaactatgcggctcaaggtttagtagctagcattaagaactttaaggcagttctttattatcaaaataatgtgttcatgtctgaggcaaaatgttggactgagactgaccttactaaaggacctcacgaattttgctcacagcatacaatgctagttaaacaaggagatgattacgtgtacctgccttacccagatccatcaagaatattaggcgcaggctgttttgtcgatgatattgtcaaaacagatggtacacttatgattgaaaggttcgtgtcactggctattgatgcttacccacttacaaaacatcctaatcaggagtatgctgatgtctttcacttgtatttacaatacattagaaagttacatgatgagcttactggccacatgttggacatgtattccgtaatgctaactaatgataacacctcacggtactgggaacctgagttttatgaggctatgtacacaccacatacagtcttgcaggctgtaggtgcttgtgtattgtgcaattcacagacttcacttcgttgcggtgcctgtattaggagaccattcctatgttgcaagtgctgctatgaccatgtcatttcaacatcacacaaattagtgttgtctgttaatccctatgtttgcaatgccccaggttgtgatgtcactgatgtgacacaactgtatctaggaggtatgagctattattgcaagtcacataagcctcccattagttttccattatgtgctaatggtcaggtttttggtttatacaaaaacacatgtgtaggcagtgacaatgtcactgacttcaatgcgatagcaacatgtgattggactaatgctggcgattacatacttgccaacacttgtactgagagactcaagcttttcgcagcagaaacgctcaaagccactgaggaaacatttaagctgtcatatggtattgccactgtacgcgaagtactctctgacagagaattgcatctttcatgggaggttggaaaacctagaccaccattgaacagaaactatgtctttactggttaccgtgtaactaaaaatagtaaagtacagattggagagtacacctttgaaaaaggtgactatggtgatgctgttgtgtacagaggtactacgacatacaagttgaatgttggtgattactttgtgttgacatctcacactgtaatgccacttagtgcacctactctagtgccacaagagcactatgtgagaattactggcttgtacccaacactcaacatctcagatgagttttctagcaatgttgcaaattatcaaaaggtcggcatgcaaaagtactctacactccaaggaccacctggtactggtaagagtcattttgccatcggacttgctctctattacccatctgctcgcatagtgtatacggcatgctctcatgcagctgttgatgccctatgtgaaaaggcattaaaatatttgcccatagataaatgtagtagaatcatacctgcgcgtgcgcgcgtagagtgttttgataaattcaaagtgaattcaacactagaacagtatgttttctgcactgtaaatgcattgccagaaacaactgctgacattgtagtctttgatgaaatctctatggctactaattatgacttgagtgttgtcaatgctagacttcgtgcaaaacactacgtctatattggcgatcctgctcaattaccagccccccgcacattgctgactaaaggcacactagaaccagaatattttaattcagtgtgcagacttatgaaaacaataggtccagacatgttccttggaacttgtcgctgttgtcctgctgaaattgttgacactgtgagtgctttagtatatgacaataagctaaaagcacacaaggataagtcagctcaatgcttcaaaatgttctacaaaggtgttattacacatgatgtttcatctgcaatcaacagacctcaaataggcgttgtaagagaatttcttacacgcaatcctgcttggagaaaagctgtttttatctcaccttataattcacagaacgctgtagcttcaaaaatcttaggattgcctacgcagactgttgattcatcacagggttctgaatatgactatgtcatattcacacaaactactgaaacagcacactcttgtaatgtcaaccgcttcaatgtggctatcacaagggcaaaaattggcattttgtgcataatgtctgatagagatctttatgacaaactgcaatttacaagtctagaaataccacgtcgcaatgtggctacattacaagcagaaaatgtaactggactttttaaggactgtagtaagatcattactggtcttcatcctacacaggcacctacacacctcagcgttgatataaagttcaagactgaaggattatgtgttgacataccaggcataccaaaggacatgacctaccgtagactcatctctatgatgggtttcaaaatgaattaccaagtcaatggttaccctaatatgtttatcacccgcgaagaagctattcgtcacgttcgtgcgtggattggctttgatgtagagggctgtcatgcaactagagatgctgtgggtactaacctacctctccagctaggattttctacaggtgttaacttagtagctgtaccgactggttatgttgacactgaaaataacacagaattcaccagagttaatgcaaaacctccaccaggtgaccagtttaaacatcttataccactcatgtataaaggcttgccctggaatgtagtgcgtattaagatagtacaaatgctcagtgatacactgaaaggattgtcagacagagtcgtgttcgtcctttgggcgcatggctttgagcttacatcaatgaagtactttgtcaagattggacctgaaagaacgtgttgtctgtgtgacaaacgtgcaacttgcttttctacttcatcagatacttatgcctgctggaatcattctgtgggttttgactatgtctataacccatttatgattgatgttcagcagtggggctttacgggtaaccttcagagtaaccatgaccaacattgccaggtacatggaaatgcacatgtggctagttgtgatgctatcatgactagatgtttagcagtccatgagtgctttgttaagcgcgttgattggtctgttgaataccctattataggagatgaactgagggttaattctgcttgcagaaaagtacaacacatggttgtgaagtctgcattgcttgctgataagtttccagttcttcatgacattggaaatccaaaggctatcaagtgtgtgcctcaggctgaagtagaatggaagttctacgatgctcagccatgtagtgacaaagcttacaaaatagaggaactcttctattcttatgctacacatcacgataaattcactgatggtgtttgtttgttttggaattgtaacgttgatcgttacccagccaatgcaattgtgtgtaggtttgacacaagagtcttgtcaaacttgaacttaccaggctgtgatggtggtagtttgtatgtgaataagcatgcattccacactccagctttcgataaaagtgcatttactaatttaaagcaattgcctttcttttactattctgatagtccttgtgagtctcatggcaaacaagtagtgtcggatattgattatgttccactcaaatctgctacgtgtattacacgatgcaatttaggtggtgctgtttgcagacaccatgcaaatgagtaccgacagtacttggatgcatataatatgatgatttctgctggatttagcctatggatttacaaacaatttgatacttataacctgtggaatacatttaccaggttacagagtttagaaaatgtggcttataatgttgttaataaaggacactttgatggacacgccggcgaagcacctgtttccatcattaataatgctgtttacacaaaggtagatggtattgatgtggagatctttgaaaataagacaacacttcctgttaatgttgcatttgagctttgggctaagcgtaacattaaaccagtgccagagattaagatactcaataatttgggtgttgatatcgctgctaatactgtaatctgggactacaaaagagaagccccagcacatgtatctacaataggtgtctgcacaatgactgacattgccaagaaacctactgagagtgcttgttcttcacttactgtcttgtttgatggtagagtggaaggacaggtagacctttttagaaacgcccgtaatggtgttttaataacagaaggttcagtcaaaggtctaacaccttcaaagggaccagcacaagctagcgtcaatggagtcacattaattggagaatcagtaaaaacacagtttaactactttaagaaagtagacggcattattcaacagttgcctgaaacctactttactcagagcagagacttagaggattttaagcccagatcacaaatggaaactgactttctcgagctcgctatggatgaattcatacagcgatataagctcgagggctatgccttcgaacacatcgtttatggagatttcagtcatggacaacttggcggtcttcatttaatgataggcttagccaagcgctcacaagattcaccacttaaattagaggattttatccctatggacagcacagtgaaaaattacttcataacagatgcgcaaacaggttcatcaaaatgtgtgtgttctgtgattgatcttttacttgatgactttgtcgagataataaagtcacaagatttgtcagtgatttcaaaagtggtcaaggttacaattgactatgctgaaatttcattcatgctttggtgtaaggatggacatgttgaaaccttctacccaaaactacaagcaagtcaagcgtggcaaccaggtgttgcgatgcctaacttgtacaagatgcaaagaatgcttcttgaaaagtgtgaccttcagaattatggtgaaaatgctgttataccaaaaggaataatgatgaatgtcgcaaagtatactcaactgtgtcaatacttaaatacacttactttagctgtaccctacaacatgagagttattcactttggtgctggctctgataaaggagttgcaccaggtacagctgtgctcagacaatggttgccaactggcacactacttgtcgattcagatcttaatgacttcgtctccgacgcagattctactttaattggagactgtgcaacagtacatacggctaataaatgggaccttattattagcgatatgtatgaccctaggaccaaacatgtgacaaaagagaatgactctaaagaagggtttttcacttatctgtgtggatttataaagcaaaaactagccctgggtggttctatagctgtaaagataacagagcattcttggaatgctgacctttacaagcttatgggccatttctcatggtggacagcttttgttacaaatgtaaatgcatcatcatcggaagcatttttaattggggctaactatcttggcaagccgaaggaacaaattgatggctataccatgcatgctaactacattttctggaggaacacaaatcctatccagttgtcttcctattcactctttgacatgagcaaatttcctcttaaattaagaggaactgctgtaatgtctcttaaggagaatcaaatcaatgatatgatttattctcttctggaaaaaggtaggcttatcattagagaaaacaacagagttgtggtttcaagtgatattcttgttaacaactaaacgaacatgtttattttcttattatttcttactctcactagtggtagtgaccttgaccggtgcaccacttttgatgatgttcaagctcctaattacactcaacatacttcatctatgaggggggtttactatcctgatgaaatttttagatcagacactctttatttaactcaggatttatttcttccattttattctaatgttacagggtttcatactattaatcatacgtttggcaaccctgtcataccttttaaggatggtatttattttgctgccacagagaaatcaaatgttgtccgtggttgggtttttggttctaccatgaacaacaagtcacagtcggtgattattattaacaattctactaatgttgttatacgagcatgtaactttgaattgtgtgacaaccctttctttgctgtttctaaacccatgggtacacagacacatactatgatattcgataatgcatttaattgcactttcgagtacatatctgatgccttttcgcttgatgtttcagaaaagtcaggtaattttaaacacttacgagagtttgtgtttaaaaataaagatgggtttctctatgtttataagggctatcaacctatagatgtagttcgtgatctaccttctggttttaacactttgaaacctatttttaagttgcctcttggtattaacattacaaattttagagccattcttacagccttttcacctgctcaagacatttggggcacgtcagctgcagcctattttgttggctatttaaagccaactacatttatgctcaagtatgatgaaaatggtacaatcacagatgctgttgattgttctcaaaatccacttgctgaactcaaatgctctgttaagagctttgagattgacaaaggaatttaccagacctctaatttcagggttgttccctcaggagatgttgtgagattccctaatattacaaacttgtgtccttttggagaggtttttaatgctactaaattcccttctgtctatgcatgggagagaaaaaaaatttctaattgtgttgctgattactctgtgctctacaactcaacatttttttcaacctttaagtgttatggcgtttctgccactaagttgaatgatctttgcttctccaatgtctatgcagattcttttgtagtcaagggagatgatgtaagacaaatagcgccaggacaaactggtgttattgctgattataattataaattgccagatgatttcatgggttgtgtccttgcttggaatactaggaacattgatgctacttcaactggtaattataattataaatataggtatcttagacatggcaagcttaggccctttgagagagacatatctaatgtgcctttctcccctgatggcaaaccttgcaccccacctgctcttaattgttattggccattaaatgattatggtttttacaccactactggcattggctaccaaccttacagagttgtagtactttcttttgaacttttaaatgcaccggccacggtttgtggaccaaaattatccactgaccttattaagaaccagtgtgtcaattttaattttaatggactcactggtactggtgtgttaactccttcttcaaagagatttcaaccatttcaacaatttggccgtgatgtttctgatttcactgattccgttcgagatcctaaaacatctgaaatattagacatttcaccttgctcttttgggggtgtaagtgtaattacacctggaacaaatgcttcatctgaagttgctgttctatatcaagatgttaactgcactgatgtttctacagcaattcatgcagatcaactcacaccagcttggcgcatatattctactggaaacaatgtattccagactcaagcaggctgtcttataggagctgagcatgtcgacacttcttatgagtgcgacattcctattggagctggcatttgtgctagttaccatacagtttctttattacgtagtactagccaaaaatctattgtggcttatactatgtctttaggtgctgatagttcaattgcttactctaataacaccattgctatacctactaacttttcaattagcattactacagaagtaatgcctgtttctatggctaaaacctccgtagattgtaatatgtacatctgcggagattctactgaatgtgctaatttgcttctccaatatggtagcttttgcacacaactaaatcgtgcactctcaggtattgctgctgaacaggatcgcaacacacgtgaagtgttcgctcaagtcaaacaaatgtacaaaaccccaactttgaaatattttggtggttttaatttttcacaaatattacctgaccctctaaagccaactaagaggtcttttattgaggacttgctctttaataaggtgacactcgctgatgctggcttcatgaagcaatatggcgaatgcctaggtgatattaatgctagagatctcatttgtgcgcagaagttcaatggacttacagtgttgccacctctgctcactgatgatatgattgctgcctacactgctgctctagttagtggtactgccactgctggatggacatttggtgctggcgctgctcttcaaataccttttgctatgcaaatggcatataggttcaatggcattggagttacccaaaatgttctctatgagaaccaaaaacaaatcgccaaccaatttaacaaggcgattagtcaaattcaagaatcacttacaacaacatcaactgcattgggcaagctgcaagacgttgttaaccagaatgctcaagcattaaacacacttgttaaacaacttagctctaattttggtgcaatttcaagtgtgctaaatgatatcctttcgcgacttgataaagtcgaggcggaggtacaaattgacaggttaattacaggcagacttcaaagccttcaaacctatgtaacacaacaactaatcagggctgctgaaatcagggcttctgctaatcttgctgctactaaaatgtctgagtgtgttcttggacaatcaaaaagagttgacttttgtggaaagggctaccaccttatgtccttcccacaagcagccccgcatggtgttgtcttcctacatgtcacgtatgtgccatcccaggagaggaacttcaccacagcgccagcaatttgtcatgaaggcaaagcatacttccctcgtgaaggtgtttttgtgtttaatggcacttcttggtttattacacagaggaacttcttttctccacaaataattactacagacaatacatttgtctcaggaaattgtgatgtcgttattggcatcattaacaacacagtttatgatcctctgcaacctgagcttgactcattcaaagaagagctggacaagtacttcaaaaatcatacatcaccagatgttgatcttggcgacatttcaggcattaacgcttctgtcgtcaacattcaaaaagaaattgaccgcctcaatgaggtcgctaaaaatttaaatgaatcactcattgaccttcaagaattgggaaaatatgagcaatatattaaatggccttggtatgtttggctcggcttcattgctggactaattgccatcgtcatggttacaatcttgctttgttgcatgactagttgttgcagttgcctcaagggtgcatgctcttgtggttcttgctgcaagtttgatgaggatgactctgagccagttctcaagggtgtcaaattacattacacataaacgaacttatggatttgtttatgagattttttactcttggatcaattactgcacagccagtaaaaattgacaatgcttctcctgcaagtactgttcatgctacagcaacgataccgctacaagcctcactccctttcggatggcttgttattggcgttgcatttcttgctgtttttcagagcgctaccaaaataattgcgctcaataaaagatggcagctagccctttataagggcttccagttcatttgcaatttactgctgctatttgttaccatctattcacatcttttgcttgtcgctgcaggtatggaggcgcaatttttgtacctctatgccttgatatattttctacaatgcatcaacgcatgtagaattattatgagatgttggctttgttggaagtgcaaatccaagaacccattactttatgatgccaactactttgtttgctggcacacacataactatgactactgtataccatataacagtgtcacagatacaattgtcgttactgaaggtgacggcatttcaacaccaaaactcaaagaagactaccaaattggtggttattctgaggataggcactcaggtgttaaagactatgtcgttgtacatggctatttcaccgaagtttactaccagcttgagtctacacaaattactacagacactggtattgaaaatgctacattcttcatctttaacaagcttgttaaagacccaccgaatgtgcaaatacacacaatcgacggctcttcaggagttgctaatccagcaatggatccaatttatgatgagccgacgacgactactagcgtgcctttgtaagcacaagaaagtgagtacgaacttatgtactcattcgtttcggaagaaacaggtacgttaatagttaatagcgtacttctttttcttgctttcgtggtattcttgctagtcacactagccatccttactgcgcttcgattgtgtgcgtactgctgcaatattgttaacgtgagtttagtaaaaccaacggtttacgtctactcgcgtgttaaaaatctgaactcttctgaaggagttcctgatcttctggtctaaacgaactaactattattattattctgtttggaactttaacattgcttatcatggcagacaacggtactattaccgttgaggagcttaaacaactcctggaacaatggaacctagtaataggtttcctattcctagcctggattatgttactacaatttgcctattctaatcggaacaggtttttgtacataataaagcttgttttcctctggctcttgtggccagtaacacttgcttgttttgtgcttgctgctgtctacagaattaattgggtgactggcgggattgcgattgcaatggcttgtattgtaggcttgatgtggcttagctacttcgttgcttccttcaggctgtttgctcgtacccgctcaatgtggtcattcaacccagaaacaaacattcttctcaatgtgcctctccgggggacaattgtgaccagaccgctcatggaaagtgaacttgtcattggtgctgtgatcattcgtggtcacttgcgaatggccggacactccctagggcgctgtgacattaaggacctgccaaaagagatcactgtggctacatcacgaacgctttcttattacaaattaggagcgtcgcagcgtgtaggcactgattcaggttttgctgcatacaaccgctaccgtattggaaactataaattaaatacagaccacgccggtagcaacgacaatattgctttgctagtacagtaagtgacaacagatgtttcatcttgttgacttccaggttacaatagcagagatattgattatcattatgaggactttcaggattgctatttggaatcttgacgttataataagttcaatagtgagacaattatttaagcctctaactaagaagaattattcggagttagatgatgaagaacctatggagttagattatccataaaacgaacatgaaaattattctcttcctgacattgattgtatttacatcttgcgagctatatcactatcaggagtgtgttagaggtacgactgtactactaaaagaaccttgcccatcaggaacatacgagggcaattcaccatttcaccctcttgctgacaataaatttgcactaacttgcactagcacacactttgcttttgcttgtgctgacggtactcgacatacctatcagctgcgtgcaagatcagtttcaccaaaacttttcatcagacaagaggaggttcaacaagagctctactcgccactttttctcattgttgctgctctagtatttttaatactttgcttcaccattaagagaaagacagaatgaatgagctcactttaattgacttctatttgtgctttttagcctttctgctattccttgttttaataatgcttattatattttggttttcactcgaaatccagagatctagaagaaccttgtaccaaagtctaaacgaacatgaaacttctcattgttttgacttgtatttctctatgcagttgcatatgcactgtagtacagcgctgtgcatctaataaacctcatgtgcttgaagatccttgtaaggtacaacactaggggtaatacttatagcactgcttggctttgtgctctaggaaaggttttaccttttcatagatggcacactatggttcaaacatgcacacctaatgttactatcaactgtcaagatccagctggtggtgcgcttatagctaggtgttggtaccttcatgaaggtcaccaaactgctgcatttagagacgtacttgttgttttaaataaacgaacaaattaaaatgtctgataatggaccccaatcaaaccaacgtagtgccccccgcattacatttggtggacccacagattcaactgacaataaccagaatggaggacgcaatggggcaaggccaaaacagcgccgaccccaaggtttacccaataatactgcgtcttggttcacagctctcactcagcatggcaaggaggaacttagattccctcgaggccagggcgttccaatcaacaccaatagtggtccagatgaccaaattggctactaccgaagagctacccgacgagttcgtggtggtgacggcaaaatgaaagagctcagccccagatggtacttctattacctaggaactggcccgaagcttcacttccctacggcgctaacaaagaaggcatcgtatgggttgcaactgagggagcctgaaatacacccaaagaccacattggcacccgcaatcctaataacaatgctgccaccgtgctacaacttcctcaaggaacaacattgccaaaaggcttctacgcagagggaagcagaggcggcagtcaagcctcttctcgctcctcatcacgtagtcgcggtaattcaagaaattcaactcctggcagcagtaggggaaattctcctgctcgaatggctagcggaggtggtgaaactgccctcgcgctattgctgctagacagattgaaccagcttgagagcaaagtttctggtaaaggccaacaacaacaaggccaaactgtcactaagaaatctgctgctgaggcatctaaaaagcctcgccaaaaacgtactgccacaaaacagtacaacgtcactcaagcatttgggagacgtggtccagaacaaacccaaggaaatttcggggaccaagacctaatcagacaaggaactgattacaaacattggccgcaaattgcacaatttgctccaagtgcctctgcattctttggaatgtcacgcattggcatggaagtcacaccttcgggaacatggctgacttatcatggagccattaaattggatgacaaagatccacaattcaaagacaacgtcatactgctgaacaagcacattgacgcatacaaaacattcccaccaacagagcctaaaaaggacaaaaagaaaaagactgatgaagctcagcctttgccgcagagacaaaagaagcagcccactgtgactcttcttcctgcggctgacatggatgatttctccagacaacttcaaaattccatgagtggagcttctgctgattcaactcaggcataaacactcatgatgaccacacaaggcagatgggctatgtaaacgttttcgcaattccgtttacgatacatagtctactcttgtgcagaatgaattctcgtaactaaacagcacaagtaggtttagttaactttaatctcacatagcaatctttaatcaatgtgtaacattagggaggacttgaaagagccaccacattttcatcgaggccacgcggagtacgatcgagggtacagtgaataatgctagggagagctgcctatatggaagagccctaatgtgtaaaattaattttagtagtgctatccccatgtgattttaatagcttcttaggagaat

SEQ ID NO: 88 - DNA, 29749 bp, Coronavirus
ttattaggtttttacctacccaggaaaagccaaccaacctcgatctcttgtagatctgttctctaaacgaactttaaaatctgtgtagctgtcgctcggctgcatgcctagtgcacctacgcagtataaacaataataaattttactgtcgttgacaagaaacgagtaactcgtccctcttctgcagactgcttacggtttcgtccgtgttgcagtcgatcatcagcatacctaggtttcgtccgggtgtgaccgaaaggtaagatggagagccttgttcttggtgtcaacgagaaaacacacgtccaactcagtttgcctgtccttcaggttagagacgtgctagtgcgtggcttcggggactctgtggaagaggccctatcggaggcacgtgaacacctcaaaaatggcacttgtggtctagtagagctggaaaaaggcgtactgccccagcttgaacagccctatgtgttcattaaacgttctgatgccttaagcaccaatcacggccacaaggtcgttgagctggttgcagaaatggacggcattcagtacggtcgtagcggtataacactgggagtactcgtgccacatgtgggcgaaaccccaattgcataccgcaatgttcttcttcgtaagaacggtaataagggagccggtggtcatagctatggcatcgatctaaagtcttatgacttaggtgacgagcttggcactgatcccattgaagattatgaacaaaactggaacactaagcatggcagtggtgcactccgtgaactcactcgtgagctcaatggaggtgcagtcactcgctatgtcgacaacaatttctgtggcccagatgggtaccctcttgattgcatcaaagattttctcgcacgcgcgggcaagtcaatgtgcactctttccgaacaacttgattacatcgagtcgaagagaggtgtctactgctgccgtgaccatgagcatgaaattgcctggttcactgagcgctctgataagagctacgagcaccagacacccttcgcaaattaagaagtgccaagaaaatttgacactttcaaaggggaatgcccaaagtttgtgtttcctcttaactcaaaagtcaaagtcattcaaccacgtgttgaaaagaaaaagactgagggtttcatggggcgtatacgctctgtgtaccctgttgcatctccacaggagtgtaacaatatgcacttgtctaccttgatgaaatgtaatcattgcgatgaagtttcatggcagacgtgcgactttctgaaagccacttgtgaacattgtggcactgaaaatttagttattgaaggacctactacatgtgggtacctacctactaatgctgtagtgaaaatgccatgtcctgcctgtcaagacccagagattggacctgagcatagtgttgcagattatcacaaccactcaaacattgaaactcgactccgcaagggaggtaggactagatgttttggaggctgtgtgtttgcctatgttggctgctataataagcgtgcctactgggttcctcgtgctagtgttgatattggctcaggccatactggcattactggtgacaatgtggagaccttgaatgaggatctccttgagatactgagtcgtgaacgtgttaacattaacattgttggcgattttcatttgaatgaagaggttgccatcattttggcatctttctctgcttctacaagtgcctttattgacactataaagagtcttgattacaagtctttcaaaaccattgttgagtcctgcggtaactataaagttaccaagggaaagcccgtaaaaggtgcttggaacattggacaacagagatcagttttaacaccactgtgtggttttccctcacaggctgctggtgttatcagatcaatttttgcgcgcacacttgatgcagcaaaccactcaattcctgatttgcaaagagcagctgtcaccatacttgatggtatttctgaacagtcattacgtcttgtcgacgccatggtttatacttcagacctgctcaccaacagtgtcattattatggcatatgtaactggtggtcttgtacaacagacttctcagtggttgtctaatcttttgggcactactgttgaaaaactcaggcctatctttgaatggattgaggcgaaacttagtgcaggagttgaatttctcaaggatgcttgggagattctcaaatttctcattacaggtgtttttgacatcgtcaagggtcaaatacaggttgcttcagataacatcaaggattgtgtaaaatgcttcattgatgttgttaacaaggcactcgaaatgtgcattgatcaagtcactatcgctggcgcaaagttgcgatcactcaacttaggtgaagtcttcatcgctcaaagcaagggactttaccgtcagtgtatacgtggcaaggagcagctgcaactactcatgcctcttaaggcaccaaaagaagtaacctttcttgaaggtgattcacatgacacagtactttacctcttgaggaggttgttctcaagaacggtgaactcgaagcactcgagacgcccgttgatagcttcacaaatggagctatcgttggcacaccagtctgtgtaaatggcctcatgctcttagagattaaggacaaagaacaatactgcgcattgtctcctggtttactggctacaaacaatgtctttcgcttaaaagggggtgcaccaattaaaggtgtaacctttggagaagatactgtttgggaagttcaaggttacaagaatgtgagaatcacatttgagcttgatgaacgtgttgacaaagtgcttaatgaaaagtgctctgtctacactgttgaatccggtaccgaagttactgagtttgcatgtgttgtagcagaggctgttgtgaagactttacaaccagtttctgatctccttaccaacatgggtattgatcttgatgagtggagtgtagctacattctacttatttgatgatgctggtgaagaaaacttttcatcacgtatgtattgttccttttaccctccagatgaggaagaagaggacgatgcagagtgtgaggaagaagaaattgatgaaacctgtgaacatgagtacggtacagaggatgattatcaaggtctccctctggaatttggtgcctcagctgaaacagttcgagttgaggaagaagaagaggaagactggctggatgatactactgagcaatcagagattgagccagaaccagaacctacacctgaagaaccagttaatcagtttactggttatttaaaacttactgacaatgttgccattaaatgtgttgacatcgttaaggaggcacaaagtgctaatcctatggtgattgtaaatgctgctaacatacacctgaaacatggtggtggtgtagcaggtgcactcaacaaggcaaccaatggtgccatgcaaaaggagagtgatgattacattaagctaaatggccctcttacagtaggagggtcttgtttgctttctggacataatcttgctaagaagtgtctgcatgttgttggacctaacctaaatgcaggtgaggacatccagcttcttaaggcagcatatgaaaatttcaattcacaggacatcttacttgcaccattgttgtcagcaggcatatttggtgctaaaccacttcagtctttacaagtgtgcgtgcagacggttcgtacacaggtttatattgcagtcaatgacaaagctctttatgagcaggttgtcatggattatcttgataacctgaagcctagagtggaagcacctaaaccagaggagccaccaaacacagaagattccaaaactgagggagaaatctgtcgtacagaagcctgtcgatgtgaagccaaaaattaaggcctgcattgatgaggttaccacaacactggaagaaactaagtttcttaccaataagttactcttgtttgctgatatcaatggtaagctttaccatgattctcagaacatgcttagaggtgaagatatgtctttccttgagaaggatgcaccttacatggtaggtgatgttatcactagtggcgatatcacttgtgttgtaataccctccaaaaaggctggtggcactactgagatgctctcaagagctttgaagaaagtgccagttgatgagtatataaccacgtaccctggacaaggatgtgctggttatacacttgagggaagctaagactgctcttaagaaatgcaaatctgcattttatgtactaccttcagaagcacctaatgctaaggaagagattctaggaactgtatcctggaatttgagagaagtgcttgctcatgctgaagagacaagaaaattaatgcctatatgcatggatgttagagccataatggcaaccatccaacgtaagtataaaggaattaaaattcaagagggcatcgttgactatggtgtccgattcttcttttatactagtaaagagcctgtagcttctattattacgaagctgaactctctaaatgagccgcttgtcacaatgccaattggttatgtgacacatggttttaatcttgaagaggctgcgcgctgtatgcgttctcttaaagctcctgccgtagtgtcagtatcatcaccagatgctgttactacatataatggatacctcacttcgtcatcaaagacatctgaggagcactttgtagaaacagtttctttggctggctcttacagagattggtcctattcaggacagcgtacagagttaggtgttgaatttcttaagcgtggtgacaaaattgggtaccacactctggagagcccccgtcgagtttcatcttgacggtgaggttctttcacttgacaaactaaagagtctcttatccctgcgggaggttaagactataaaagtgttcacaactgtggacaacactaatctccacacacagcttgtggatatgtctatgacatatggactgcagtttggtccaacatacttggatggtgctgatgttacaaaaattaaacctcatgtaaatcatgagggtaagactttctttgtactacctagtgatgacacactacgtagtgaagctttcgagtactaccatactcttgatgagagttttcttggtaggtacatgtctgctttaaaccacacaaagaaatggaaatttcctcaagttggtggtttaacttcaattaaatgggctgataacaattgttatttgtctagtgttttattagcacttcaacagcttgaagtcaaattcaatgcaccagcacttcaagaggcttattatagagcccgtgctggtgatgctgctaacttttgtgcactcatactcgcttacagtaataaaactgttggcgagcttggtgatgtcagagaaactatgacccatcttctacagcatgctaatttggaatctgcaaagcgagttcttaatgtggtgtgtaaacattgtggtcagaaaactactaccttaacgggtgtagaagctgtgatgtatatgggtactctatcttatgataatcttaagacaggtgtttccattccatgtgtgtgtggtcgtgatgctacacaatatctagtacaacaagagtcttcttttgttatgatgtctgcaccacctgctgagtataaattacagcaaggtacattcttatgtgcgaatgagtacactggtaactatcagtgtggtcattacactcatataactgctaaggagaccctctatcgtattgacggagctcaccttacaaagatgtcagagtacaaaggaccagtgactgatgttttctacaaggaaacatcttacactacaaccatcaagcctgtgtcgtataaactcgatggtgttacttacacagagattgaaccaaaattggatgggtattataaaaaggataatgcttactatacagagcagcctatagaccttgtaccaactcaaccattaccaaatgcgagttttgataatttcaaactcacatgttctaacacaaaatttgctgatgatttaaatcaaatgacaggcttcacaaagccagcttcacgagagctatctgtcgcattcttcccagacttgaatggcgatgtagtggctattgactatagacactattcagcgagtttcaagaaaggtgctaaattactgcataggccaattgtttggcacattaacccggctacaaccaagacaacgttcaaaccaaacacttggtgtttacgttgtctttggagtacaaagccagtagatacttcaaattcatttgaagttctggcagtagaagacacacaaggaatggacaatctcgcttgtgaaagtcaacaaacccacctctgaagaagtagtggaaaatcctaccatacagaaggaagtcatagagtgtgacgtgaaaactaccgaagttgtaggcaaatgtcatacttaaaccatcagatgaaggtgttaaagtaacacaagagttaggtcatgaggatcttatggctgcttatgtggaaaacacaagcattaccattaagaaacctaatgagctttcactagccttaggtttaaaaacaattgccactcatggtattgctgcagttaatagtgttccttggagtaaaattttggcttatgtcaaaccattcttaggacaagcagcaattacaacatcaaattgcgctaagagattagcacaacgtgtgtttaacaattatatgccttatgtgtttacattattgttccaattgtgtacttttactaaaagtaccaattctagaattagagcttcactacctacaactattgctaaaaatagtgttaagagtgttgctaaattatgtttggatgccggcattaattatgtgaagtcacccaaattttctaaattgttcacaatcgctatgtggctattgttgttaagtatttgcttaggttctctaatctgtgtaactgctgcttttggtgtactcttatctaattttggtgctccttcttattgtaatggcgttagagaattgtatcttaattcgtctaacgttactgctatggatttctgtgaaggttcttttccttgcagcatttgtttaagtggattagactcccttgattcttatccagctcttgaaaccattcaggtgacgatttcatcgtacaagctagacttgacaattttaggtctggccgctgagtgggttttggcatatatgttgttcacaaaattcttttatttattaggtctttcagctataatgcaggtgttctttggctattttgctagtcatttcatcagcaattcttggctcatgtggtttatcattagtattgtacaaatggcacccgtttctgcaatggttaagatgtacatcttctttgcttctttctactacatatggaagagctatgttcatatcatggatggttgcacctcttcgacttgcatgatgtgctataagcgcaatcgtgccacacgcgttgagtgtacaactattgttaatggcatgaagagatctttctatgtctatgcaaatggaggccgtggcttctgcaagactcacaattggaattgtctcaattgtgacacattttgcactggtagtacattcattagtgatgaagttgctcgtgatttgtcactccagtttaaaagaccaatcaaccctactgaccagtcatcgtatattgttgatagtgttgctgtgaaaaatggcgcgcttcacctctacttcgacaaggctggtcaaaagacctatgagagacatccgctctcccattttgtcaatttagacaatttgagagctaacaaacactaaaggttcactgcctattaatgccatagtttttgatggcaagtccaaatacgacgagtctgcttctaagtctgcttctgtgtactacagtcagctgatgtgccaacctattctgttgcttgaccaagctcttgtatcagacgttggagatagtactgaagtttccgttaagatgtttgatgcttaagtcgacaccttttcagcaacttttagtgttcctatggaaaaacttaaggcacttgttgctacagctcacagcgagttagcaaagggtgtagcttttagatggtgtcctttctacattcgtgtcagctgcccgacaaggtgttgttgataccgatgttgacacaaaggatgttattgaatgtctcaaactttcacatcactctgacttagaagtgacaggtgacagttgtaacaatttcatgctcgcctataataaggttgaaaacatgacgcccagagatcttggcgcatgtattgactgtaatgcaaggcatatcaatgcccaagtagcaaaaagtcacaatgtttcactcatctggaatgtaaaagactacgtgtctttatctgaacagctgcgtaaacaaattcgtagtgccgccaagaagaacaacataccttttagactaacttgtgctacaactagacaggttgtcaatgtcataactactaaaatctcactcaagggtggtaagattgttagtacttgttttaaacttatgcttaaggccacattattgtgcgttcttgctgcattggtttgttatatcgttatgccagtacatacattgtcaatccatgatggttacacaaatgaaatcattggttacaaagccattcaggatggtgtcactcgtgacatcatttctactgatgattgttttgcaaataaacatgctggttttgacgcatggtttagccagcgtggtggttcatacaaaaatgacaaaagctgccctgtagtagctgctatcattacaagagagattggtttcatagtgcctggcttaccgggtactgtgctgagagcaatcaatggtgacttcttgcattttctacctcgtgtttttagtgctgttggcaacatttgctacacaccttccaaactcattgagtatagtgattttgctacctctgcttgcgttcttgctgctgagtgtacaatttttaaggatgctatgggcaaacctgtgccatattgttatgacactaatttgctagagggttctatttcttatagtgagcttcgtccagacactcgttatgtgcttatggatggttccatcatacagtttcctaacacttacctggagggttctgttagagtagtaacaacttttgatgctgagtactgtagacatggtacatgcgaaaggtcagaagtaggtatttgcctatctaccagtggtagatgggttcttaataatgagcattacagagctctatcaggagttttctgtggtgttgatgcgatgaatctcatagctaacatctttactcctcttgtgcaacctgtgggtgctttagatgtgtctgcttcagtagtggctggtggtattattgccatattggtgacttgtgctgcctactactttatgaaattcagacgtgtttttggtgagtacaaccatgttgttgctgctaatgcacttttgtttttgatgtctttcactatactctgtctggtaccagcttacagctttctgccgggagtctactcagtcttttacttgtacttgacattctatttcaccaatgatgtttcattcttggctcaccttcaatggtttgccatgttttctcctattgtgcctttttggataacagcaatctatgtattctgtatttctctgaagcactgccattggttctttaacaactatcttaggaaaagagtcatgtttaatggagttacatttagtaccttcgaggaggctgctttgtgtacctttttgctcaacaaggaaatgtacctaaaattgcgtagcgagacactgttgccacttacacagtataacaggtatcttgctctatataacaagtacaagtatttcagtggagccttagatactaccagctatcgtgaagcagcttgctgccacttagcaaaggctctaaatgactttagcaactcaggtgctgatgttctctaccaaccaccacagacatcaatcacttctgctgttctgcagagtggttttaggaaaatggcattcccgtcaggcaaagttgaagggtgcatggtacaagtaacctgtggaactacaactcttaatggattgtggttggatgacacagtatactgtccaagacatgtcatttgcacagcagaagacatgcttaatcttaactatgaagatctgctcattcgcaaatccaaccatagctttcttgttcaggctggcaatgttcaacttcgtgttattggccattctatgcaaaattgtctgcttaggcttaaagttgatacttctaaccctaagacacccaagtataaatttgtccgtatccaacctggtcaaacattttcagttctagcatgctacaatggttcaccatctggtgtttatcagtgtgccatgagacctaatcataccattaaaggttctttccttaatggatcatgtggtagtgttggttttaacattgattatgattgcgtgtctttctgctatatgcatcatatggagcttccaacaggagtacacgctggtactgacttagaaggtaagttctatggtccatttgttgacagacaaactgcacaggctgcaggtacagacacaaccataacataaatgtttggcatggctgtatgctgctgttatcaatggtgataggtggtttcttaatagattcaccactactttgaatgactttaaccttgtggcaatgaagtgcaactatgaacctttgacacaagatcatgttgacatattgggacctctttctgctcaaacaggaattgccgtcttagatatgtgtgctgctttgaaagagctgctgcagaatggtatgaatggtcgtactatccttggtagcactattttagaagatgagtttacaccatttgatgttgttagacaatgctctggtgttaccttccaaggtaagttcaagaaaattgttaagggcactcatcattggatgcttttaactttcttgacatcactattgattcttgttcaaagtacacagtggtcactgtttttctttgtttacgagaatgctttcttgccattcactcttggtattatggcaattgctgcatgtgctatgctgcttgttaagcataagcacgcattcttgtgcttgtttctgttaccttctcttgcaacagttgcttactttaatatggtctacatgcctgctagctgggtgatgcgtatcatgacatggcttgaattggctgacactagcttgtctggttataggcttaaggattgtgttatgtatgcttcagctttagttttgcttattctcatgacagctcgcactgtttatgatgatgctgctagacgtgtttggacactgatgaatgtcattacacttgtttacaaagtctactatggtaatgctttagatcaagctatttccatgtgggccttagttatttctgtaacctctaactattctggtgtcgttacgactaccatgtttttagctagagctatagtgtttgtgtgtgttgagtattacccattgttatttattactggcaacaccttacagtgtatcatgcttgtttattgtttcttaggctattgttgctgctgctactttggccttttctgtttactcaaccgttacttcaggcttactcttggtgtttatgactacttggtctctacacaagaatttaggtatatgaactcccaggggcttttgcctcctaagagtagtattgatgctttcaagcttaaccattaagttgttgggtattggaggtaaaccatgtatcaaggttgctactgtaccagtctaaaatgtctgacgtaaagtgcacatctgcggtactgctctcggttcttcaacaacttagagtagagtcatcttctaaattgtgggcacaatgtgtacaactccacaatgatattcttcttgcaaaagacacaactgaagctttcgagaagatggtttctcttttgtctgttttgctatccatgcagggtgctgtagacattaataggttgtgcgaggaaatgctcgataaccgtgctactcttcaggctattgcttcagaatttagttctttaccatcatatgccgcttatgccactgcccaggaggcctatgagcaggctgtagctaatggtgattctgaagtcgttctcaaaaagttaaagaaatctttgaatgtggctaaatctgagtttgaccgtgatgctgccatgcaacgcaagttggaaaagatggcagatcaggctatgacccaaatgtacaaacaggcaagatctgaggacaagagggcaaaagtaactagtgctatgcaaacaatgctcttcactatgcttaggaagcttgataatgatgcacttaacaacattatcaacaatgcgcgtgatggttgtgttccactcaacatcataccattgactacagcagccaaactcatggttgttgtccctgattatggtacctacaagaacacttgtgatggtaacacctttacatatgcatctgcactctgggaaatccagcaagttgttgatgcggatagcaagattgttcaacttagtgaaattaacatggacaattcaccaaatttggcttggcctcttattgttacagctctaagagccaactcagctgttaaactacagaatagtgaactgagtccagtagcactacgacagatgtcctgtgcggctggtaccacacaaacagcttgtactgatgacaatgcacttgcctactataacaatccgaagggagataggtttgtgctggcattactatcaggccaccaagatctcaaatgggctagattccctaagagtgatggtacaggtacaatttacacagaactggacccaccttgtaggtttgttacagacacaccaaaagggcctaaagtgaaatacttgtacttcatcaaaggcttaaacaacctaaatagaggtatggtgctgggcagtttagctgctacagtacgtcttcaggctggaaatgctacagaagtacctgccaattcagctgtgctttccttctgtgcttttgcagtagaccctgctaaagcatataaggattacctagcaagtggaggacaaccaatcaccaactgtgtgaagatgttgtgtacacacactggtacaggacaggcaattactgtaacaccagaagctaacatggaccaagagtcctttggtggtgcttcatgttgtctgtattgtagatgccacattgaccatccaaatcctaaaggattctgtgacttgaaaggtaagtacgtccaaatacctaccacttgtgctaatgacccagtgggttttacacttagaaacacagtctgtaccgtctgcggaatgtgaaaaggttatggctgtagttgtgaccaactccgcgaacccttgatgcagtctgcggacgcatcaacgtttttaaacgggtttgcggtgtaagtgcagcccgtcttacaccgtgcggcacaggcactagtactgatgtcgtctacagggcttttgatatttacaacgaaagagttgctggttttgcaaagttcctaaaaactaattgctgtcgcttccaggagaaggatgaggaaggcaatttattagactcttactttgtagttaagaggcatactatgtctaactaccaacatgaagagactatttataacttggttaaagattgtccagcggttgctgtccatgactttttcaagtttagagtagatggtgacatggtaccacatatatcacgtcagcgtctaactaaatacacaatggctgatttagtctatgctctacgtcattttgatgagggtaattgtgatacattaaaagaaatactcgtcacatacaattgctgtgatgatgattatttcaataagaaggattggtatgacttcgtagagaatcctgacatcttacgcgtatatgctaacttaggtgagcgtgtacgccaatcattattaaggactgtacaattctgcgatgctatgcgtgatgcaggcattgtaggcgtactgacattagataatcaggatcttaatgggaactggtacgatttcggagatttcgtacgagtagcacccaggctgcggagttcctattgtggattcatattactcattgctgatgccccatcctcactttgactagggccattggctgctgagtcccatatggatgctgatctcgcaaaacccacttattaagtgggatttgctgaaatatgattttacggaagagagactttgtctcttcgaccgttattttaaatattgggacccagacatacccatcccaattgtattaactgtttggatgataggtgtatccttcattgtgcaaactttaatgtgttattttctactgtgtttccacctacaagttttggaccactagtaagaaaaatatttgtagatggtgctccttttgttgtttcaactggataccattttcgtgagttaggagtcgtacataatcaggatgtaaacttacatagctcgcgtctcagtttcaaggaacttttagtgtatgctgctgatccagctatgcatgcagcttctggcaatttattgctagataaacgcactacatgcttttcagtagctgcactaacaaacaatgttgcttttcaaactgtcaaacccggtaattttaataaagacttttatgactttgctgtgtctaaaggtttctttaaggaaggaagttctgttgaactaaaacacttcttctttgctcaggatggcaacgctgctatcagtgattatgactattatcgttataatctgccaacaatgtgtgatatcagacaactcctattcgtagttgaagttgttgataaatactttgattgtcacgatggtggctgtattaatgccaaccaagtaatcgttaacaatctggataaatcagctggtttcccatttaataaatggggtaaggctagactttattatgactcaatgagttatgaggatcaagatgcacttgtcgcgtatactaagcgtaatgtcatccctactataactcaaatgaatcttaagtatgccattagtgcaaagaatagagctcgcaccgtagctggtgtctctatctgtagtactatgacaaatagacagtttcatcagaaattattgaagtcaatagccgccactagaggagctactgtggtaattggaacaagcaagttttacggtggctggcataatatgttaaaaactgtttacagtgatgtagaaactccacaccttatgggttgggattatccaaaatgtgacagagccatgcctaacatgcttaggataatggcctctcttgttcttgctcgcaaacataacacttgctgtaacttatcacaccgtttctacaggttagctaacgagtgtgcgcaagtattaagtgagatggtcatgtgtggcggctcactatatgttaaaccaggtggaacatcatccggtgatgctacaactgcttatgctaatagtgtctttaacatttgtcaagctgttacagccaatgtaaatgcacttctttcaactgatggtaataagatagctgacaagtatgtccgcaatctacaacacaggctctatgagtgtctctatagaaatagggatgttgatcatgaattcgtggatgagttttacgcttacctgcgtaaacatttctccatgatgattctttctgatgatgccgttgtgtgctataacagtaactatgcggctcaaggtttagtagctagcattaagaactttaaggcagttctttattatcaaaataatgtgttcatgtctgaggcaaaatgttggactgagactgactttactaaaggacctcacgaattttgctcacagcatacaatgctagttaaacaaggagatgattacgtgtacctgccttacccagatccatcaagaatattaggcgcaggctgttttgtcgatgatattgtcaaaacagatggtacacttatgattgaaaggttcgtgtcactggctattgatgcttacccacttacaaaacatcctaatcaggagtatgctgatgtctttcacttgtatttacaatacattagaaagttacatgatgagcttactggccacatgttggacatgtattccgtaatgctaactaatgataacacctcacggtactgggaacctgagttttatgaggctatgtacacaccacatacagtcttgcaggctgtaggtgcttgtgtattgtgcaattcacagacttcacttcgttgcggtgcctgtattaggagaccattcctatgttgcaagtgctgctatgaccatgtcatttcaacatcacacaaattagtgttgtctgttaatccctatgtttgcaatgccccgggttgtgatgtcactgatgtgacacaactgtatctaggaggtatgagctattattgcaagtcacataagcctcccattagttttccattatgtgctaatggtcaggtttttggtttatacaaaaacacatgtgtaggcagtgacaatgtcactgacttcaatgcgatagcaacatgtgattggactaatgctggcgattacatacttgccaacacttgtactgagagactcaagcttttcgcagcagaaacgctcaaagccactgaggaaacatttaagctgtcatatggtattgccactgtacgcgaagtactctctgacagagaattgcatctttcatgggaggttggaaaacctagaccaccattgaacagaaactatgtctttactggttaccgtgtaactaaaaataataaagtacagattggagagtacacctttgaaaaaggtgactatggtgatgctgttgtgtacagaggtactacgacatacaagttgaatgttggtgattactttgtgttgacatctcacactgtaatgccacttagtgcacctactctagtgccacaagagcactatgtgagaattactggcttgtacccaacactcaacatctcagatgagttttctagcaatgttgcaaattatcaaaaggtcggcatgcaaaagtactctacactccaaggaccacctggtactggtaagagtcattttgccatcggacttgctctctattacccatctgctcgcatagtgtatacggcatgctctcatgcagctgttgatgccctatgtgaaaaggcattaaaatatttgcccatagataaatgtagtagaatcatacctgcgcgtgcgcgcgtagagtgttttgataaattcaaagtgaattcaacactagaacagtatgttttctgcactgtaaatgcattgccagaaacaactgctgacattgtagtctttgatgaaatctctatggctactaattatgacttgagtgttgtcaatgctagacttcgtgcaaaacactacgtctatattggcgatcctgctcaattaccagccccccgcacattgctgactaaaggcacactagaaccagaatattttaattcagtgtgcagacttatgaaaacaataggtccagacatgttccttggaacttgtcgccgttgtcctgctgaaattgttgacactgtgagtgctttagtttatgacaataagctaaaagcacacaaggataagtcagctcaatgcttcaaaatgttctacaaaggtgttattacacatgatgtttcatctgcaatcaacagacctcaaataggcgttgtaagagaatttcttacacgcaatcctgcttggagaaaagctgtttttatctcaccttataattcacagaacgctgtagcttcaaaaatcttaggattgcctacgcagactgttgattcatcacagggttctgaatatgactatgtcatattcacacaaactactgaaacagcacactcttgtaatgtcaaccgcttcaatgtggctatcacaagggcaaaaattggcattttgtgcataatgtctgatagagatctttatgacaaactgcaatttacaagtctagaaataccacgtcgcaatgtggctacattacaagcagaaaatgtaactggactttttaaggactgtagtaagatcattactggtcttcatcctacacaggcacctacacacctcagcgttgatataaagttcaagactgaaggattatgtgttgacataccaggcataccaaaggacatgacctaccgtagactcatctctatgatgggtttcaaaatgaattaccaagtcaatggttaccctaatatgtttatcacccgcgaagaagctattcgtcacgttcgtgcgtggattggctttgatgtagagggctgtcatgcaactagagatgctgtgggcactgacctacctctccagctaggattttctacaggtgttaacttagtagctgtaccgactggttatgttgacactgaaaataacacagaattcaccagagttaatgcaaaacctccaccaggtgaccagtttaaacatcttataccactcatgtataaaggcttgccctggaatgtagtgcgtattaagatagtacaaatgctcagtgatacactgaaaggattgtcagacagagtcgtgttcgtcctttgggcgcatggctttgagcttacatcaatgaagtactttgtcaagattggacctgaaagaacgtgttgtctgtgtgacaaacgtgcaacttgcttttctacttcatcagatacttatgcctgctggaatcattctgtgggttttgactatgtctataacccatttatgattgatgttcagcagtggggctttacgggtaaccttcagagtaaccatgaccaacattgccaggtacatggaaatgcacatgtggctagttgtgatgctatcatgactagatgtttagcagtccatgagtgctttgttgagcgcgttgattggtctgttgaataccctattataggagatgaactgagggttaattctgcttgcagaaaagtacaacacatggttgtgaagtctgcattgcttgctgataagttcccagttcttcatgacattggaaatccaaaggctatcaagtgtgtgcctcaggctgaagtagaatggaagttctacgatgctcagccatgtagtgacaaagcttacaaaatagaggaactcttctattcttatgccacacatcacggtaaatttcactgatggtgtttgtttgttttggaattgtaacgttgatcgttacccagccaatgcaattgtgtgtaggtttgacacaagagtcttgtcaaacttgaacttaccaggctgtgatggtggtagtttgtatgtgaataagcatgcattccacactccagctttcgataaaagtgcatttactaatttaaagcaattgcctttcttttactattctgatagtccttgtgagtctcatggcaaacaagtagtgtcggatattgattatgttccactcaaatctgctacgtgtattacacgatgcaatttaggtggtgctgtttgcagacaccatgcaaatgagtaccgacagtacttggatgcatataatatgatgacttctgctggatttagcctatggatttacaaacaatttgatacttataacctgtggaatacatttaccaggttacagagtttagaaaatgtggcttataatgttgttaataaaggacactttgatggacacgccggcgaagcacctgtttccatcattaataatgctgtttacacaaaggtagatggtattgatgtggagatctttgaaaataagacaacacttcctattaatgttgcatttgagctttgggctaagcgtaacattaaaccagtgccagagattaagatactcaataatttgggtgttgatatcgctgctaatactgtaatctgggactacaaaagagaagccccagcacatgtatctacaataggtgtctgcacaatgactgacattgccaagaaacctactgagagtgcttgttcttcacttactgtcttgtttgatggtagagtggaaggacaggtagacctttttagaaacgcccgtaatggtgttttaataacagaaggtccagtcaaaggactaacaccttcaaaaggtccagcacaagctagcgtcaatggagtcacattaattggagaatcagtaaaaacacggtttaactactttaagaaagtagacggcattattcaacagttgcctgaaacctactttactcagagcagagacttagaggattttaagcccagatcacaaatggaaactgactttctcgagctcgctatggatgaattcatacagcgatataagctcgagggctatgccttcgaacacatcgtttatggagatttcagtcatggacaacttggcggtcttcatttaatgataggcttagccaagcgctcacaagattcaccacttaaattagaggattttatccctatggacagcacagtgaaaaattacttcataacagatgcgcaaacaggttcatcaaaatgtgtgtgttctgtgattgatcttttacttgatgactttgtcgagataataaagtcacaagatttgtcagtgatttcaaaagtggtcaaggttacaattgactatgctgaaatttcattcatgctttggtgtaaggatggacatgttgaaaccttctacccaaaactacaagcaagtcaagcgtggcaaccaggtgttgcgatgcctaacttgtacaagatgcaaagaatgcttcttgaaaagtgtgaccttcagcaattatggtgaaaatgctgttataccaaaaggaataatgatgaatgtcgcaaagtatactcaactgtgtcaatacttaaatacacttactttagccgtaccctacaacatgagagttattcactttggtgctggctctgataaaggagttgcaccaggtacagctgtgctcagacaatggttgccaactggcacactacttgtcgattcagatcttaatgacttcgtctccgacgcagattctactttaattggagactgtgcaacagtacatacggctaataaatgggaccttattattagcgatatgtatgaccctaggaccaaacatgtgacaaaagagaatgactctaaagaagggtttttcacttatctgtgtggatttataaagcaaaaactagccctgggtggttctatagctgtaaagataacagagcattcttggaatgctgacctttacaagcttatgggccatttctcatggtggacagcttttgttacaaatgtaaatgcatcatcatcggaagcatttttaattggggctaactatctcggcaagccgaaggaacaaattgatggctataccatgcatgctaactacattttctggaggaacacaaatcctatccagttgtcttcctattcactctttgacatgagcaaatttcctcttaaattaagaggaactgctgtaatgtctcttaaggagaatcaaatcaatgatatgatttattctcttctggaaaaaggtaggcttatcattagagaaaacaacagagttgtggtttcaagtgatattcttgttaacaactaaacgaacatgtttattttcttattatttcttactctcactagtggtagtgaccttgaccggtgcatcacttttgatgatgttcaagctcctaattacactcaacatacttcatctatgaggggggtttactatcctgatgaaatttttagatcagacactctttatttaactcaggatttatttcttccattttattctaatgttacagggtttcatactattaatcatacgtttggcaaccctgtcataccttttaaggatggtatttattttgctgccacagagaaatcaaatgttgtccgtggttgggtttttggttctaccatgaacaacaagtcacagtcggtgattattattaacaattctactaatgttgttatacgagcatgtaactttgaattgtgtgacaaccctttctttgctgtttctaaacccatgggtacacagacacatactatgatattcgataatgcatttaattgcactttcgagtacatatctgatgccttttcgcttgatgtttcagaaaagtcaggtaattttaaacacttacgagagtttgtgtttaaaaataaagatgggtttctctatgtttataagggctatcaacctatagatgtagttcgtgatctaccttctggttttaacactttgaaacctatttttaagttgcctcttggtattaacattacaaattttagagccattcttacagccttttcacctgctcaagacatttggggcacgtcagctgcagcctattttgttggctatttaaagccaactacatttatgctcaagtatgatgaaaatggtacaatcacagatgctgttgattgttctcaaaatccacttgctgaactcaaatgctctgttaagagctttgagattgacaaaggaatttaccagacctctaatttcagggttgttccctcaggagatgttgtgagattccctaatattacaaacttgtgtccttttggagaggtttttaatgctactaaattcccttctgtctatgcatgggagagaaaagaaatttctaattgtgttgctgattactctgtgctctacaactcaacatttttttcaacctttaagtgctatggcgtttctgccactaagttgaatgatctttgcttctccaatgtctatgcagattcttttgtagtcaagggagatgatgtaagacaaatagcgccaggacaaactggggttattgctgattataattataaattgcccagatgatttcatgggttgtgtccttgcttggaatactaggaacattgatgctacttcaactggtaattataattataaatataggtatcttagacatggcaagcttaggccctttgagagagacatatctaatgtgcctttctcccctgatggcaaaccttgcaccccacctgctcttaattgttattggccattaaatgattatggtttttacaccactactggcattggctaccaaccttacagagttgtagtactttcttttgaacttttaaatgcaccggccacggtttgtggaccaaaattatccactgaccttattaagaaccagtgtgtcaattttaattttaatggactcactggtactggtgtgttaactccttcttcaaagagatttcaaccatttcaacaatttggccgtgatgtttctgatttcactgattccgttcgagatcctaaaacatctgaaatattagacatttcaccttgctcttttgggggtgtaagtgtaattacacctggaacaaatgcttcatctgaagttgctgttctatatcaagatgttaactgcactgatgtttctacagcaattcatgcagatcaactcacaccagcttggcgcatatattctactggaaacaatgtattccagactcaagcaggctgtcttataggagctgagcatgtcgacacttcttatgagtgcgacattcctattggagctggcatttgtgctagttaccatacagtttctttattacgtagtactagccaaaaatctattgtggcttatactatgtctttaggtgctgttagttcaattgcttactctaataacaccattgctatacctactaacttttcaattagcattactacagaagtaatgcctgtttctatggctaaaacctccgtagattgtaatatgtacatctgcggagattctactgaatgtgctaatttgcttctccaatatggtagcttttgcacacaactaaatcgtgcactctcaggtattgctgctgaacaggatcgcaacacacgtgaagtgttcgctcaagtcaaacaaatgtacaaaaccccaactttgaaatattttggtggttttaatttttcacaaatattacctgaccctctaaagccaactaagaggtcttttattgaggacttgctctttaataaggtgacactcgctgatgctggcttcatgaagcaatatggcgaatgcctaggtgatattaatgctagagatctcatttgtgcgcagaagttcaatggacttacagtgttgccacctctgctcactgatgatatgattgctgcctacactgctgctctagttagtggtactgccactgctggatggacatttggtgctggcgctgctcttcaaataccttttgctaagcaaatggcatataggttcaatggcattggagttacccaaaatgttctctatgagaaccaaaaacaaatcgccaaccaatttaacaaggcgattagtcaaattcaagaatcacttacaacaacatcaactgcattgggcaagctgcaagacgttgttaaccagaatgctcaagcattaaacacacttgttaaacaacttagctctaattttggtgcaatttcaagtgtgctaaatgatatcctttcgcgacttgataaagccgaggcggaggtacaaattgacaggttaattacaggcagacttcaaagccttcaaacctatgtaacacaacaactaatcagggctgctgaaatcagggcttctgctaatcttgctactactaaaatgtctgagtgtgttcttggacaatcaaaaagagttgacttttgtggaaagggctaccaccttatgtccttcccacaagcagccccgcatggtgttgtcttcctacatgtcacgtatgtgccatcccaggagaggaacttcaccacagcgccagcaatttgtcatgaaggcaaagcatacttccctcgtgaaggtgtttttgtgtttaatggcactccttggtttattacacagaggaacttcttttctccacaaataattactacagacaatacatttgtctcaggaagttgtgatgtcgttattggcatcattaacaacacagtttatgatcctctacaacctgagcttgactcattcaaagaagagctggacaagtacttcaaaaatcatacatcaccggatgttgatcttggcgacatttcaggcattaacgcttctgtcgtcaacattcaaaaagaaattgaccgcctcaatgaggtcgctaaaaatttaaatgaatcactcattgaccttcaagaattgggaaaatatgagcaatatattaaatggccttggtatgtttggctcggcttcattgctggactaattgccatcgtcatggttacaatcttgctttgttgcatgactagttgttgcagttgcctcaagggtgcatgctcttgtggttcttgctgcaagtttgatgaggatgactctgagccagttctcaagggtgtcaaattacattacacataaacgaacttatggatttgtttgatgagattttttactcttagatcaattactgcacagccagtaaaaattgacaatgcttctcctgcaagtactgttcatgctacagcaacgataccgctacaagcctcactccctttcggatggcttgttattggcgttgcatttcttgctgtttttcagagcgctaccaaaataattgcgctcaataaaagatggcagctagccctttataagggcttccagttcatttgcaatttactgctgctatttgttaccatctattcacatcttttgcttgtcgctgcaggtatggaggcgcaatttttgtacctctatgccttgatatattttctacaatgcatcaacgcatgtagaattattatgagatgttggctttgttggaagtgcaaatccaagaacccattactttatgatgccaactactttgtttgctggcacacacataactatgactactgtataccatataacagtgtcacagatacaattgtcgttactgaaggtgacggcatttcaacaccaaaactcaaagaagactaccaaattggtggttattctgaggataggcactcaggtgttaaagactatgtcgttgtacatggctatttcaccgaagtttactaccagctggagtctacacaaattactacagacactggtattgaaaatgctacattcttcatctttaacaagcttgttaaggacccaccgaatgtgcaaatacacacaatcgacggctcttcaggagttgctaatccagcaatggatccaatttatgatgagccgacgacgactactagcgtgcctttgtaagcacaagaaagtgagtacgaacttatgtactcattcgtttcggaagaaacaggtacgttaatagttaatagcgtacttctttttcttgctttcgtggtattcttgctagtcacactagccatccttactgcgcttcgattgtgtgcgtactgctgcaatattgttaacgtgagtttagtaaaaccaacggtttacgtctactcgcgtgttaaaaatctgaactcttctgaaggagttcctgatcttctggtctaaacgaactaactattattattattctgtttggaactttaacattgcttatcatggcagacaacggtactattaccgttgaggagcttaaacaactcctggaacaatggaacctagtaataggtttcctattcctagcctggattatgttactacaatttgcctattctaatcggaacaggtttttgtacataataaagcttgttttcctctggctcttgtggccagtaacacttgcttgttttgtgcttgctgctgtctacagaattaattgggtgactggcgggattgcgattgcaatggcttgtattgtaggcttgatgtggcttagctacttcgttgcttccttcaggctgtttgctcgtacccgctcaatgtggtcattcaacccagaaacaaacattcttctcaatgtgcctctccgggggacaattgtgaccagaccgctcatggaaagtgaacttgtcattggtgctgtgatcattcgtggtcacttgcgaatggccggacactccctagggcgctgtgacattaaggacctgccaaaagagatcactgtggctacatcacgaacgctttcttattacaaattaggagcgtcgcagcgtgtaggcactgattcaggttttgctgcatacaaccgctaccgtattggaaactataaattaaatacagaccacgccggtagcaacgacaatattgctttgctagtacagtaagtgacaacagatgtttcatcttgttgacttccaggttacaatagcagagatattgattatcattatgaggactttcaggattgctatttggaatcttgacgttataataagttcaatagtgagacaattatttaagcctctaactaagaagaattattcggagttagatgatgaagaacctatggagttagattatccataaaacgaacatgaaaattattctcttcctgacattgattgtatttacatcttgcgagctatatcactatcaggagtgagttagaggtacgactgtactactaaaagaaccttgcccatcaggaacatacgagggcaattcaccatttcaccctcttgctgacaataaatttgcactaacttgcactagcacacactttgcttttgcttgtgctgacggtactcgacatacctatcagctgcgtgcaagatcagtttcaccaaaacttttcatcagacaagaggaggttcaacaagagctctactcgccactttttctcattgttgctgctctagtatttttaatactttgcttcaccattaagagaaagacagaatgaatgagctcactttaattgacttctatttgtgctttttagcctttctgctattccttgttttaataatgcttattatattttggttttcactcgaaatccaggatctagaagaaccttgtaccaaagtctaaacgaacatgaaacttctcattgttttgacttgtatttctctatgcagttgcatatgcactgtagtacagcgctgtgcatctaataaacctcatgtgcttgaagatccttgtaaggtacaacactaggggtaatacttatagcactgcttggctttgtgctctaggaaaggttttaccttttcatagatggcacactatggttcaaacatgcacacctaatgttactatcaactgtcaagatccagctggtggtgcgcttatagctaggtgttggtaccttcatgaaggtcaccaaactgctgcatttagagacgtacttgttgttttaaataaacgaacaaattaaaatgtctgataatggaccccaatcaaaccaacgtagtgccccccgcattacatttggtggacccacagattcaactgacaataaccagaatggaggacgcaatggggcaaggccaaaacagcgccgaccccaaggtttacccaataatactgcgtcttggttcacagctctcactcagcatggcaaggaggaacttagattccctcgaggccagggcgttccaatcaacaccaatagtggtccagatgaccaaattggctactaccgaagagctacccgacgagttcgtggtggtgacggcaaaatgaaagagctcagccccagatggtacttctattacctaggaactggcccagaagcttcacttccctacggcgctaacaaagaaggcatcgtatgggttgcaactgagggagccttgaatacacccaaagaccacattggcacccgcaatcctaataacaatgctgccaccgtgctacaacttcctcaaggaacaacattgccaaaaggcttctacgcagagggaagcagaggcggcagtcaagcctcttctcgctcctcatcacgtagtcgcggtaattcaagaattcactcctggcagcagtaggggaaattctcctgctcgaatggctagcggaggtggtgaaactgccctcgcgctattgctgctagacagattgaaccagcttgagagcaaagtttctggtaaaggccaacaacaacaaggccaaactgtcactaagaaatctgctgctgaggcatctaaaaagcctcgccaaaaacgtactgccacaaaacagtacaacgtcactcaagcatttgggagacgtggtccagaacaaacccaaggaaatttcggggaccaagacctaatcagacaaggaactgattacaaacattggccgcaaattgcacaatttgctccaagtgcctctgcattctttggaatgtcacgcattggcatggaagtcacaccttcgggaacatggctgacttatcatggagccattaaattggatgacaaagatccacaattcaaagacaacgtcatactgctgaacaagcacattgacgcatacaaaacattcccaccaacagagcctaaaaaggacaaaaagaaaaagactgatgaagctcagcctttgccgcagagacaaaagaagcagcccactgtgactcttcttcctgcggctgacatggatgatttctccagacaacttcaaaattccatgagtggagcttctgctgattcaactcaggcataaacactcatgatgaccacacaaggcagatgggctatgtaaacgttttcgcaattccgtttacgatacatagtctactcttgtgcagaatgaattctcgtaactaaacagcacaagtaggtttagttaactttaatctcacatagcaatctttaatcaatgtgtaacattagggaggacttgaaagagccaccacattttcatcgaggccacgcggagtacgatcgagggtacagtgaataatgctagggagagctgcctatatggaagagccctaatgtgtaaaattaattttagtagtgctatccccatgtgattttaatagcttcttaggagaatgacaa

SEQ ID NO: 89 - DNA, 28586 bp, Coronavirus
acttttaaagtaaagtgagtgtagcgtggctatatctcttcttttactttaactagccttgtgctagattttgtcttcggacaccaactcgaactaaacgaaatatttgtctttctatgaaatcatagaggacaagcgttgattatttccattcagtttggcaatcactccttggaacggggttgagcgaacggtgcagtagggttccgtccctatttcgtaagtcgcctagtagtagcgagtgcggttccgcccgtacaacgttgggtagaccgggttccgtcctgtgatctccctcgccggccgccaggagaatgagttccaaacaattcaagatccttgttaatgaggactatcaagtcaacgtgcctagtcttcctattcgtgacgtgttacaggaaattaagtactgctaccgtaatggatttgagggctatgttttcgtaccagaatactgtcgtgacctagttgattgcgatcgtaaggatcactacgtcattggtgttcttggtaacggagtaagtgatcttaaacctgttcttcttaccgaaccctccgtcatgttgcaaggctttattgttagagctaactgcaatggcgttcttgaggactttgaccttaaaattgctcgcactggcagaggtgccatatatgttgatcaatacatgtgtggtgctgatggaaaaccagtcattgaaggcgattttaaggactacttcggtgatgaagacatcattgaatttgaaggagaggagtaccattgcgcttggacaactgtgcgcgatgagaaaccgctgaatcagcaaactctctttaccattcaggaaatccaatacaatctggacattcctcataaattgccaaactgtgctactagacatgtagcaccaccagtcaaaaagaactctaaaatagttctgtctgaagattacaagaagctttatgatatcttcggatcaccctttatgggaaatggtgactgtcttagcaaatgctttgacactcttcattttatcgctgctactcttagatgcccgtgtggttctgaaagtagcggcgttggagattggactggttttaagactgcctgttgtggtctttctggcaaagttaagggtgtcactttgggtgatattaagcctggtgatgctgttgtcactagtatgagcgcaggtaagggagttaagttctttgccaattgtgttcttcaatatgctggtgatgttgaaggtgtctccatctggaaagttattaaaacttttacagttgatgagactgtatgcacccctggttttgaaggcgaattgaacgacttcatcaaacctgagagcaaatcactagttgcatgcagcgttaaaagagcattcattactggtgatattgatgatgctgtacatgattgtatcattacaggaaaattggatcttagtaccaacctttttggtaatgttggtctattattcaagaagactccatggtttgtacaaaagtgtggtgcactttttgtagacgcttggaaagtagtagaggagctttgtggttcactcacacttacatacaagcaaatttatgaagttgtagcatcactttgcacttctgcttttacgattgtaaactacaagccaacatttgtggttccagacaatcgtgttaaagatcttgtagacaagtgtgtgaaagttcttgtaaaagcatttgatgtttttacgcagattatcacaatagctggtattgaggccaaatgctttgtgcttggtgctaaatacctgttgttcaataatgcacttgtcaaacttgtcagtgttaaaatccttggcaagaagcaaaagggtcttgaatgtgcattctttgctactagcttggttggtgcaactgttaatgtgacacctaaaagaacagagactgccactatcagcttgaacaaggttgatgatgttgtagcaccaggagagggttatatcgtcattgttggtgatatggctttctacaagagtggtgaatattatttcatgatgtctagtcctaattttgttcttactaacaatgtttttaaagcagttaaagttccatcttatgacatcgtttatgatgttgataatgataccaaaagcaaaatgattgcaaaacttggttcatcatttgaatatgatggtgatattgatgctgctattgtaaaagtcaatgaactactcattgaatttaggcagcaaagcttgtgcttcagagcttttaaggacgacaaaagcatttttgttgaagcctattttaaaaagtataaaatgccagcatgccttgcaaaacatattggtttgtggaacatcataaagaaagattcatgtaagaggggttttcttaatctcttcaatcacttgaatgaattggaagatatcaaagaaactaatattcaggctattaaaaacattctttgccctgatcctcttcttgatctggattatggtgccatttggtacaattgcatgccaggttgctctgatccttcagttttggggagtgttcaacttttgatcggtaatggtgtgaaagtagtttgtgatggctgcaaaggttttgctaaccaactttcaaaaggttacaacaagctctgtaatgcggctcgcaatgatattgagatcggtggtataccattttccacttttaaaacacctacaaatacttttattgaaatgacagatgctatctattcagttattgaacaaggtaaggcattatcctttagagatgctgatgtgccagttgtagacaatggtaccatttctactgctgattggtctgaacccattctgcttgaacctgctgaatatgtaaaaccaaagaacaatggtaatgtcattgttattgcaggttatacattttataaagatgaggatgaacatttttatccttatggttttggtaaaattgtgcagagaatgtataataaaatgggtggtggtgacaaaactgtctcattttcagaagaagtagatgttcaagaaattgcacctgttacacgtgttaaacttgaattcgaatttgacaatgaaattgtaactggtgttcttgaacgggctattggtactagatacaaatttactggtacaacttgggaagaatttgaagagtctatttctgaagaactcgatgcaatctttgatactctagcaaaccaaggtgtcgaacttgaaggttacttcatttatgacacttgtggtggctttgatataaaaaatccagatggtattatgatctctcagtatgatatcaatattactgctgatgaaaaatcagaagttagtgcatcaagtgaagaagaagaagttgaatctgttgaagaagatcctgagaatgaaattgtagaagcatctgaaggtgctgaagggacttcttctcaagaagaggttgaaacagtagaagttgcagatattacttctacagaagaagatgttgacattgttgaagtatctgctaaagatgacccttgggctgcagctgttgatgtacaagaagctgaacaatttaatccttctctaccacctttcaagacaacgaatctcaacggaaaaattatccttaagcaaggggataataattgttggataaatgcttgttgctatcagcttcaggcctttgattttttcaacaatgaagcttgggagaaatttaagaaaggtgatgtcatggactttgtaaacctttgttatgcagcaacaacactagcaagaggtcattctggtgatgcagagtatcttcttgaacttatgctcaatgattatagcacagccaagatagtacttgcagctaagtgtggttgtggtgaaaaagaaattgttttggaaagagctgtttttaaactcaccccacttaaggagagttttaattatggtgtttgtggtgactgcatgcaagttaacacctgtagatttttaagtgttgaaggctctggtgtttttgttcatgacatattaagcaagcaaacgccagaagctatgtttgttgtcaaacctgttatgcatgcagtttacactggcacaactcaaaatggccattacatggttgatgatattgaacacggttattgtgtagatggtatgggtattaaaccacttaagaaacggtgttatacatccacattgttcattaatgccaatgtaatgactagagctgaaaaaccaaaacaagagtttaaagttgaaaaagtagaacagcaaccgatagtggaggaaaacaaatcctctattgaaaaagaggaaattcaaagtcctaaaaacgatgaccttatacttccattttacaaagctggtaaactttccttttatcagggtgctttggatgttttgatcaatttcttggaacctgatgttattgttaatgctgctaatggtgatcttaaacacatgggtggtgtcgcaagagccatcgatgttttcactggtggcaaattaacagaacgttctaaggattatcttaaaaagaacaaatctattgctcctggtaatgctgttttctttgaaaatgtcattgagcatcttagtgttttgaatgcagttggaccacgtaatggtgacagccgagttgaagccaaactttgtaatgtttacaaagcaattgcaaagtgtgaaggaaaaatattaacaccacttattagtgttggtatctttaatgttagacttgaaacatcattgcagtgcttacttaagactgtgaatgacaggggattgaatgtcttcgtatacactgaccaggagaggcaaactattgagaatttcttctcttgttctatccctgtcaatgttactgaggataatgttaaccatgaacgtgtgtctgtttcttttgacaaaacatacggtgaacagcttaagggcaccgttgtcatcaaagacaaagatgttacaaaccagttgcctagcgcttttgatgttggtcaaaaagttattaaggctattgatatagattggcaagctcattatggtttccgtgatgctgctgcttttagcgctagtagtcatgatgcttataaatttgaagttgttacacatagcaatttcattgtgcataagcagactgacaacaactgttggattaatgcaatttgtcttgcattacagagactcaagccacagtggaaatttcctggtgttagaggtctctggaatgaatttcttgagcgtaaaacacaaggttttgtacatatgttgtatcacatttctggagtaaagaaaggtgagccaggtgatgctgaattaatgctgcataaacttggtgacttgatggacaatgattgtgaaatcattgtcacacacactacagcatgtgacaagtgcgcaaaagtagaaaagtttgttggaccagtggtagcagcacctcttgcaattcatggcactgacgaaacatgtgtgcatggcgttagtgtcaatgtcaaagtcacccaaattaagggcactgttgctattacttctttgattggtcctattattggagaagtactagaagcaactggttatatttgttatagcggttctaacaggaatggtcattacacctattacgataaccgtaatggattagtggttgatgcagaaaaggcttaccattttaatagagacttattacaggtcacaacagctattgcaagtaatttcgttgtcaagaaaccacaagcagaggaaagacctaagaattgtgcttttaacaaagttgcagcatctcctaagattgtacaagaacaaaaattgttggctattgaaagtggtgctaactatgctcttactgaatttggaagatatgctgacatgttctttatggctggagataaaattcttaggttgctgcttgaagtctttaaatatttgctggttttatttatgtgtcttagaagtactaagatgcctaaagttaaagtcaaaccacctcttgcatttaaagattttggtgctaaggtcagaacgctcaattacatgagacaattgaacaaaccctctgtctggcgttacgcaaaactagttttattgttgatagcaatatataatttcttttatttgtttgtcagtataccagtagtgcataaattaacatgtaacggtgctgtacaggcatataaaaattctagttttataaagtctgcagtctgtggcaactctattttatgcaaagcctgtttggcttcttatgatgagttggctgattttcaacatctccaagttacttgggatttcaaatctgacccactatggaacagactggtacaattgtcttactttgcattcttggctgtttttggtaataactatgttaggtgttttcttatgtattttgtatctcagtacctcaacctttggctttcttattttggttatgtagagtacagttggtttttgcatgttgtcaactttgaatccatctcagctgagtttgtgatcgtagttatagtggttaaggcagttctcgcccttaaacatattgttttcgcatgctcaaacccgtcttgcaaaacgtgctctaggactgcaaggcagacacgtattcctattcaagttgttgttaatggttcaatgaagactgtttatgttcatgctaatggtactggtaaattctgcaagaaacacaatttttattgtaagaactgtgattcttatggctttgaaaacacattcatctgtgacgaaattgtacgtgatctcagtaatagtgttaaacaaactgtttacgccactgatagatctcatcaagaagtcacaaaagttgaatgttcagatggcttttacagattttatgttggtgatgaattcacttcatatgactatgatgtaaaacacaagaaatacagtagtcaagaggttctcaagagcatgctcttgcttgatgacttcattgtgtacagtccatctggttctgctcttgcaaatgttagaaatgcctgtgtttacttttcacaacttattggtaagcctattaagattgttaacagtgatttgcttgaagacctctctgtagattttaaaggggcactttttaatgctaaaaagaatgtaattaagaattctttcaatgttgatgtctcagaatgcaaaaatcttgacgaatgttacagggcttgcaatcttaatgtttcattttctacatttgaaatggctgtcaacaatgctcataggtttggtattctgattactgatcgttcttttaacaatttctggccatcaaaagttaagcctggttcatctggtgtgtcggccatggacattggtaagtgtatgacttctgatgctaagattgttaatgctaaagttttaactcaacgtggtaaaagtgttgtttggcttagccaggattttgctgcacttagctcaactgctcagaaagttttggttaaaacttttgtagaagaaggtgtcaacttttcactcacatttaatgctgtaggttcagatgatgatcttccttatgaaagattcactgaatctgtgtctccaaaaagtggttcaggctttttcgatgtaattacacagcttaaacaaattgtgattttggtttttgtttttatctttatttgtggtttgtgctctgtttacagtgttgctacacagtcctacattgaatctgctgaaggctatgactacatggttattaagaatggaattgttcaaccttttgacgataccatttcatgtgttcataacacttataaaggattcggtgactggtttaaagctaagtatggttttatccctacttttggtaaatcatgtccaattgttgtaggaactgtttttgatcttgaaaatatgagaccaattcctgacgtgcctgcatatgtttctattgtgggtagatctcttgttttcgctattaatgctgcttttggtgttactaatatgtgctatgatcatactggcaatgcagttagtaaggactcttactttgatacttgtgtgtttaatactgcgtgcaccactcttacaggtcttggtggtacaattgtatattgtgcaaagcaaggtttagttgaaggtgctaagctctatagtgatcttatgccagactattattatgagcatgctagtggtaacatggttaaattgccagcaattattagaggacttggtctacgttttgtgaaaacacaggctacaacttattgtagagtgggagagtgcattgatagtaaagctggtttttgctttggtggcgataactggtttgtctacgacaatgagtttggcaatggatacatctgtggtaattctgtgctaggattctttaagaatgtcttcaaactctttaactctaacatgtctgtggtagctacatctggtgcgatgcttgttaacattattattgcatgcttagctattgcaatgtgttatggtgttcttaagtttaagaagatttttggtgattgtactttcctcattgttatgatcattgtcacccttgttgtgaacaatgtgtcttattttgtcactcaaaacacgttctttatgatcatctacgccattgtttactattttataacaagaaaacttgcatacccaggcattcttgatgctgggtttattattgcttatattaatatggctccatggtacgtgattaccgcatatatcctagttttcctctatgactcactcccttcactgtttaaacttaaagtttcaacaaatctttttgaaggtgataaatttgtgggtaactttgaatctgctgctatgggtacttttgttattgacatgcgttcatatgaaactattgttaattctacttctattgctagaattaaatcatatgctaacagcttcaataaatataagtactacacaggttcaatgggagaagctgactacagaatggcttgctatgctcatcttggtaaagctcttatggactattctgttaatagaacagacatgctttacacacctcctactgttagtgttaattctacacttcagtcaggtttgcggaaaatggcacagcctagtggtcttgtagagccttgcattgtaagagtttcctatggtaacaatgtgcttaatggtttatggttaggagatgaagtcatttgccctagacatgttattgctagtgataccacacgtgttatcaactatgaaaatgaaatgtctagtgtgagacttcacaacttttcagtttctaagaataatgtgtttttgggtgttgtgtctgccagatataagggtgtgaatcttgtacttaaagtcaaccaggttaatcctaacacaccagaacataaatttaagtctattaaagctggtgaaagttttaacattcttgcttgttatgaaggatgtcctggcagtgtttatggtgtcaacatgagaagtcaaggtaccattaaaggatcttttatagctggtacttgtggatcagtaggttatgtgttagaaaatggaattctctattttgtatacatgcatcacttagaacttggaaatggctcgcatgttggttccaattttgaaggagaaatgtacggtggttatgaagatcaacctagcatgcaattggaaggtactaatgtcatgtcatcagataatgtggttgcattcctatatgctgcacttatcaatggtgaaaggtggtttgttacaaacacatcgatgtcattagaatcatacaatacatgggccaaaactaacagtttcacagaactttcttcaactgatgcttttagcatgttggctgcaaaaactggtcaaagtgttgagaaattactagatagcatcgtaagactcaacaagggttttggaggtcgtactatactttcttatggctcattgtgtgacgagttcactccaactgaagtcataaggcaaatgtatggtgtaaatcttcaggctggtaaagtaaaatctttcttctaccctattatgactgcaatgacaattctctttgccttttggcttgaattctttatgtacacacccttcacttggattaatccaacttttgttagcattgtattggctgttacaactttgatctcgacggtttttgtctctggcatcaaacataagatgttgttctttatgtcttttgtccttcctagtgttatccttgtgacagcacacaatttgttctgggacttttcttactatgaaagtcttcagtcaattgttgagaatactaacactatgtttttgcctgttgacatgcaaggtgtcatgctcacagtgttttgctttattgtctttgttacatatagtgttagattcttcacttgcaaacaatcatggttctcacttgctgtgacaactattcttgtgatctttaacatggttaaaatctttggaacatctgatgaaccatggactgaaaaccaaattgctttctgctttgtgaacatgcttactatgattgtcagtcttactacaaaggattggatggttgtcattgcatcatacagaattgcatattatattgttgtatgtgtaatgccatctgcttttgtatctgactttgggtttatgaagtgtattagcattgtttacatggcgtgcggttatttgttttgttgctattatggcattctttattgggttaacagatttacatgcatgacttgtggtgtttatcaattcactgtgtctgcagctgaacttaaatacatgaccgctaacaacctttctgcacctaagaacgcatatgacgctatgattcttagtgctaaattgattggtgttggaggtaagagaaacatcaaaatttcaactgtacagtcaaaacttacagagatgaaatgtaccaatgttgtcttgcttggtcttttatctaaaatgcatgtcgagtctaactcaaaagagtggaactattgtgttggactacacaatgagataaacctttgtgacgatcctgaaatcgttcttgagaaactgttagctcttattgcattcttcttgtccaaacataacacttgtgaccttagcgaacttattgaatcatactttgagaacaccaccatactccagagtgtggcttcagcttatgctgcattgcctagctggattgcacttgaaaaagctcgcgctgatcttgaagaggctaagaaaaatgatgttagccctcaaattttgaagcagcttactaaagcatttaacattgccaagagtgattttgagcgcgaagcatcagtgcaaaagaaactcgacaaaatggctgagcaggctgcagctagtatgtataaagaagcacgagctgtggacagaaagtcaaagattgtttctgctatgcatagcctactttttggtatgcttaagaaacttgatatgtccagtgtcaacactattattgaccaggctcgtaatggtgttctacctttaagtatcattccagctgcatcagctacaagacttgttgttattacacctagccttgaagtgttttccaagattaggcaagaaaacaatgttcattatgctggtgctatttggactattgttgaagttaaagatgctaatggttcacatgtacatcttaaggaagtcaccgctgctaatgaattaaaccttacttggccattgagcattacttgtgagagaaccacaaagcttcagaacaatgaaattatgccaggtaaacttaaagaaagagctgtcagagcgtcagcaactcttgatggtgaagctttcggcagtggaaaggctcttatggcatctgaaagtggaaaaagctttatgtatgcatttatagcctcagacaacaatcttaagtatgttaagtgggagagcaataatgatattatacctattgaacttgaagctccattgcgtttctatgttgacggcgctaatggtcctgaagtcaagtatttgtattttgtcaagaatttaaacactcttagacgtggtgccgttcttggttatatcggtgcaacagttcgtctgcaagctggtaaacccactgaacatccatctaacagtagtttattgacattgtgtgctttttcacctgatcctgctaaagcatatgttgatgctgttaagagaggcatgcaaccagttaataactgtgtaaaaatgctctcaaatggtgctggtaatggtatggctgttacaaacggtgtcgaagctaacacacaacaggactcttatggtggtgcttcagtttgtatttattgcagatgccatgttgaacatcctgctattgatggattatgccgctacaaaggtaagttcgtgcaaataccaactggcacacaagatccaattcggttctgtattgaaaatgaagtttgtgttgtctgtggttgttggcttaacaatggttgcatgtgcgatcgtacttctatgcagagttttactgttgatcaaagttatttaaacgagtgcggggttctagtgcagctcgactagaaccctgcaatggtactgatccagaccatgttagtagagcttttgacatctacaacaaagatgttgcgtgtattggtaaattccttaagacgaattgttcaagatttaggaatttggacaaacatgatgcctactacattgtcaaacgttgtacaaagaccgttatggaccatgagcaagtctgttataacgatcttaaagattctggtgctgttgctgagcatgacttcttcacatataaagagggtagatgtgagttcggtaatgttgcacgtaggaatcttacaaagtacacaatgatggatctttgttacgctatcagaaattttgatgaaaagaactgtgaagttctcaaagaaatactcgtgacagtaggtgcttgcactgaagaattctttgaaaataaagattggtttgatccagttgaaaatgaagccatacatgaagtttatgcaaaacttggacccattgtagccaatgctatgcttaaatgtgttgctttttgcgatgcgatagtggaaaaaggctatataggtgttataacacttgacaaccaagatcttaatggcaatttctacgatttcggcgatttcgtgaagactgctccgggttttggttgcgcttgtgttacatcatattattcttatatgatgcctttaatggggatgacttcatgcttagagtctgaaaactttgtgaaaagtgacatctatggttctgattataagcagtatgatttactagcttatgattttaccgaacataaggagtaccttttccaaaaatactttaagtactgggatcgcacatatcacccaaattgttctgattgtactagtgacgagtgtattattcattgtgctaattttaacacattgttttctatgacaataccaatgacagcttttggaccacttgtccgtaaagttcatattgatggtgtaccagtagttgttactgcaggttaccatttcaaacaacttggtatagtatggaatcttgatgtaaaattagacacaatgaagttgagcatgactgatcttcttagatttgtcacagatccaacacttcttgtagcatcaagccctgcacttttagaccagcgtactgtctgtttctccattgcagctttgagtactggtattacatatcagacagtaaaaccaggtcactttaacaaggatttctacgatttcataacagagcgtggattctttgaagagggatctgagttaacattaaaacattttttctttgcacagggtggtgaagctgctatgacagacttcaattattatcgctacaatagagtcacagtacttgatatttgccaagctcaatttgtttacaaaatagttggcaagtattttgaatgttatgacggtgggtgcattaatgctcgtgaagttgttgttacaaactatgacaagagtgctggctatcctttgaacaaatttggtaaagctagactttactacgaaactctttcatatgaagagcaggatgcactttttgctttaacaaagagaaatgttttacccacaatgactcaaatgaatttgaaatacgctatttctggtaaggcaagagctcgtacagtaggaggagtttcacttctttctaccatgactacgagacaatatcatcagaagcatttgaagtcaattgctgcaacacgcaatgctactgtggtcattggttcaaccaagttttatggtggttgggacaatatgcttaaaaatttaatgcgtgatgttgataatggttgtttgatgggatgggactatcctaagtgtgaccgtgctttacctaatatgattagaatggcttctgccatgatattaggttctaagcatgttggttgttgtacacataatgataggttctaccgcctctccaatgagttagctcaagtactcacagaagttgtgcattgcacaggtggtttttattttaaacctggtggtacaactagcggtgatggtactacagcatatgctaactctgcttttaacatctttcaagctgtttctgctaatgttaataagcttttgggggttgattcaaacgcttgtaacaacgttacagtaaaatccatacaacgtaaaatttacgataattgttatcgtagtagcagcattgatgaagaatttgttgttgagtactttagttatttgagaaaacacttttctatgatgattttatctgatgatggagttgtgtgctacaacaaagattatgcggatttaggttatgtagctgacattaatgcttttaaagcaacactttattaccagaataacgtctttatgtccacttctaagtgttgggtagaaccagatcttagtgttggaccacatgaattttgttcacagcatacattgcagattgttgggcctgatggagactactatcttccctatccagacccgtccagaattttgtcagctggtgtgtttgttgatgacatagttaaaacagacaatgttattatgttagaacgttacgtgtcattggctattgacgcatacccgctcacaaaacaccctaagcctgcttatcaaaaagtgttttacactctactagattgggttaaacatctacagaaaaatttgaatgcaggtgttcttgattcgttttcagtgacaatgttagaggaaggtcaagataagttctggagtgaagagttttacgctagcctctatgaaaagtccactgtcttgcaagctgcaggcatgtgtgtagtatgtggttcgcaaactgtacttcgttgtggagactgtcttaggagaccacttttatgcacgaaatgtgcttacgaccatgttatgggaacaaagcataaattcattatgtctatcacaccatatgtgtgtagttttaatggttgtaatgtcaatgatgttacaaagttgtttttaggtggtcttagttattattgtatgaaccacaaaccacagttgtcattcccactctgtgctaatggcaacgtttttggtctatataaaagtagtgcagtcggctcagaggctgttgaagatttcaacaaacttgcagtttctgactggactaatgtagaagactacaaacttgctaacaatgtcaaggaatctctgaaaattttcgctgctgaaactgtgaaagctaaggaggagtctgttaaatctgaatatgcttatgctgtattaaaggaggttatcggccctaaggaaattgtactccaatgggaagcttctaagactaagcctccacttaacagaaattcagttttcacgtgttttcagataagtaaggatactaaaattcaattaggtgaatttgtgtttgagcaatctgagtacggtagtgattctgtttattacaagagcacgagtacttacaaattgacaccaggtatgatttttgtgttgacttctcataatgtgagtcctcttaaagctccaattttagtcaaccaagaaaagtacaataccatatctaagctctatcctgtctttaatatagcggaggcctataatacactggttccttactaccaaatgataggtaagcaaaaatttacaactatccaaggtcctcctggtagcggtaaatctcattgtgttataggtttgggtttgtattaccctcaggcgagaatagtctacactgcatgttctcatgcggctgtagacgctttatgtgaaaaagcagccaaaaacttcaatgttgatagatgttcaaggataatacctcaaagaatcagagttgattgttacacaggctttaagcctaataacaccaatgcgcagtacttgttttgtactgttaatgctctaccagaagcaagttgtgacattgttgtagttgatgaggtctctatgtgtactaattatgatcttagtgtcataaatagccgactgagttacaaacatattgtttatgttggagacccacagcagctaccagctcctagaactttgattaataagggtgtacttcaaccgcaggattacaatgttgtaaccaaaagaatgtgcacactaggacctgatgtctttttgcataaatgttacaggtgcccagctgaaattgttaagacagtctctgcacttgtttatgaaaataaatttgtacctgtcaacccagaatcaaagcagtgcttcaaaatgtttgtaaaaggtcaggttcagattgagtctaactcttctataaacaacaagcaactagaggttgtcaaggcctttttagcacataatccaaaatggcgtaaagctgttttcatctcaccctataatagtcaaaattatgttgctcggcgtcttcttggtttgcaaacgcaaactgtggattccgctcagggtagtgagtatgattacgtcatctacacacagacctccgatacacagcatgctactaatgttaacagatttaatgttgccattacgagagcaaaggttggtatactttgtatcatgtgtgatagaactatgtatgagaatcttgatttctatgaactcaaagattcaaagattggtttacaagcaaaacctgaaacttgtggtttatttaaagattgttcgaagagcgaacaatacataccacctgcttatgcaacgacatatatgagcttatctgataattttaagacaagtgatggtttagctgttaacatcggtacaaaagatgttaaatatgctaatgtcatctcatatatgggattcaggtttgaagccaacataccaggctatcacacactattctgcacgcgagattttgctatgcgtaatgttagagcatggcttgggtttgacgttgaaggtgcacatgtctgtggtgataatgttggaactaatgtaccattacagctgggtttctcaaacggtgtggattttgtagtgcaaactgaaggatgtgttattactgaaaaaggtaatagcattgaggttgtaaaagcacgagcaccaccaggtgagcaatttgcacacttgattccgcttatgagaaagggtcaaccttggcacattgttagacgccgtatagtgcagatggtctgtgactattttgatggcttatcagacattctgatctttgtgctttgggctggtggtcttgaacttacaactatgagatactttgttaaaattggaagaccacaaaaatgtgaatgcggcaaaagtgcaacttgttatagtagctctcaatctgtttatgcttgcttcaagcatgcattaggatgtgattatttatataacccttactgcattgacatacagcaatggggttacacaggatctttgagcatgaatcatcatgaagtttgcaacattcatagaaatgagcatgtagctagtggtgatgctatcatgactagatgtctcgctatacatgactgttttgtcaaacgtgttgattggtcaattgtgtacccttttattgacaatgaagaaaagatcaataaagctggtcgcatagtgcagtcacatgtcatgaaagctgctctgaagatttttaatcctgctgcaattcacgatgtgggtaatccaaaaggcatccgttgtgctacaacaccaataccatggttttgttatgatcgtgatcctattaataacaatgttagatgtctggattatgactatatggtacatggtcaaatgaatggtcttatgttattttggaactgtaatgtagacatgtacccagagttttcaattgtttgtagatttgatactcgcactcgctctaaattgtctttagaaggttgtaatggtggtgcattgtatgttaataaccatgctttccacacaccagcttatgatagaagagcttttgctaagcttaaacctatgccattcttttactatgatgatagtaattgtgaacttgttgatgggcaacctaattatgtaccacttaagtcaaatgtttgcataacaaaatgcaacattggtggtgctgtctgcaagaagcatgctgctctttacagagcgtatgttgaggattacaacatttttatgcaggctggttttacaatatggtgtcctcaaaactttgacacctatatgctttggcatggttttgttaatagcaaagcacttcagagtctagaaaatgtggcttttaatgtcgttaagaaaggtgccttcaccggtttaaaaggtgacttaccaactgctgttattgctgacaaaataatggtaagagatggacctactgacaaatgtatttttacaaataagactagtttacctacaaatgtagcttttgagttatatgcaaaacgcaaacttggactcacacctccattaacaatacttaggaatttaggtgttgtcgcaacatataagtttgtgttgtgggattatgaagctgaacgtcctttctcaaatttcactaagcaagtgtgttcctacactgatcttgatagtgaagttgtaacatgttttgataatagtattgctggttcttttgagcgttttactactacaagagatgcagtgcttatttctaataacgctgtgaaagggcttagtgccattaaattacaatatggccttttgaatgatctacctgtaagtactgttggaaataaacctgtcacatggtatatctatgtgcgcaagaatggtgagtacgtcgaacaaatcgatagttactatacacagggacgtacttttgaaaccttcaaacctcgtagtacaatggaagaagattttcttagtatggatactacactcttcatccaaaagtatggtcttgaggattatggttttgaacacgttgtatttggagatgtctctaaaactaccattggtggtatgcatcttcttatatcgcaagtgcgccttgcaaaaatgggtttgttttccgttcaagaatttatgaataattctgacagtacactgaaaagttgttgtattacatatgctgatgatccatcttctaagaatgtgtgcacttatatggacatactcttggacgattttgtgactatcattaagagcttagatcttaatgttgtgtccaaagttgtggatgtcattgtagattgtaaggcatggagatggatgttgtggtgtgagaattcacatattaaaaccttctatccacaactccaatctgctgaatggaatcccggctatagcatgcctacactgtacaaaatccagcgtatgtgtctcgaacggtgtaatctctacaattatggtgcacaagtgaaattacctgatggcattactactaatgtcgttaagtatactcagttgtgtcaataccttaacactactacattgtgtgtaccacacaaaatgcgtgtattgcatttaggagctgctggtgcatctggtgttgctcctggtagtactgtattaagaagatggttaccagatgatgccatattggttgataatgatttgagagattacgtttccgacgcagacttcagtgttacaggtgattgtactagtctttacatcgaagacaagtttgatttgctcgtctctgatttatatgatggctccacaaaatcaattgacggtgaaaacacgtcgaaagatggtttctttacttatattaatggtttcattaaagagaaactgtcacttggtggatctgttgccattaaaatcacggaatttagttggaataaagatttatatgaattgattcaaagatttgagtattggactgtgttttgtacaagtgttaacacgtcatcatcagaaggctttctgattggtattaactacttaggaccatactgtgacaaagcaatagtagatggaaatataatgcatgccaattatatattttggagaaactctacaattatggctctatcacataactcagtcctagacactcctaaattcaagtgtcgttgtaacaacgcacttattgttaatttaaaagaaaaagaattgaatgaaatggtcattggattactaaggaagggtaagttgctcattagaaataatggtaagttactaaactttggtaaccacttcgttaacacaccatgaaaaaactatttgtggttttggtcgtaatgccattgatttatggagacaattttccttgttctaaattgactaatagaactataggcaaccagtggaatctcattgaaaccttccttctaaactatagtagtaggttaccacctaattcagatgtggtgttaggtgattattttcctactgtacaaccttggtttaattgcattcgcaatgatagtaatgacctttatgttacactggaaaatcttaaagcattgtattgggattatgctacagaaaatatcacttggaatcacagacaacggttaaacgtagtcgttaatggatacccatactccatcacagttacaacaacccgcaattttaattctgctgaaggtgctattatatgcatttgtaagggctcaccacctactaccaccacagaatctagtttgacttgcaattggggtagtgagtgcaggttaaaccataagttccctatatgtccttctaattcagaggcaaattgtggtaatatgctgtatggcctacaatggtttgcagatgaggttgttgcttatttacatggtgctagttaccgtattagttttgaaaatcaatggtctggcactgtcacatttggtgatatgcgtgcgacaacattagaagtcgctggcacgcttgtagacctttggtggtttaatcctgtttatgatgtcagttattatagggttaataataaaaatggtactaccgtagtttccaattgcactgatcaatgtgctagttatgtggctaatgtttttactacacagccaggaggttttataccatcagattttagttttaataattggttccttctaactaatagctccacgttggttagtggtaaattagttaccaaacagccgttattagttaattgcttatggccagtccctagctttgaagaagcagcttctacattttgttttgagggtgctggctttgatcaatgtaatggtgctgttttaaataatactgtagacgtcattaggttcaaccttaattttactacaaatgtacaatcaggtaagggtgccacagtgttttcattgaacacaacgggtggtgtcactcttgaaatttcatgttatacagtgagtgactcgagctttttcagttacggtgaaattccgttcggcgtaactgatggaccacggtactgttacgtacactataatggcacagctcttaagtatttaggaacattaccacctagtgtcaaggagattgctattagtaagtggggccatttttatattaatggttacaatttctttagcacatttcctattgattgtatatcttttaatttgaccactggtgatagtgacgttttctggacaatagcttacacatcgtacactgaagcattagtacaagttgaaaacacagctattacaaaggtgacgtattgtaatagtcacgttaataacattaaatgctctcaaattactgctaatttgaataatggattttatcctgtttcttcaagtgaagttggtcttgtcaataagagtgttgtgttactacctagcttttacacacataccattgttaacataactattggtcttggtatgaagcgtagtggttatggtcaacccatagcctcaacattaagtaacatcacactaccaatgcaggatcacaacaccgatgtgtactgtattcgttctgaccaattttcagtttatgttcattctacttgcaaaagtgctttatgggacaatatttttaagcgaaactgcacggacgttttagatgccacagctgttataaaaactggtacttgtcctttctcatttgataaattgaacaattacttaacttttaacaagttctgtttgtcgttgagtcctgttggtgctaattgtaagtttgatgtagctgcccgtacaagaaccaatgagcaggttgttagaagtttgtatgtaatatatgaagaaggagacaacatagtgggtgtaccgtctgataatagtggtgtgcacgatttgtcagtgctacacctagattcctgcacagattacaatatatatggtagaactggtgttggtattattagacaaactaacaggacgctacttagtggcttatattacacatcactatcaggtgatttgttaggttttaaaaatgttagtgatggtgtcatctactctgtaacgccatgtgatgtaagcgcacaagcagctgttattgatggtaccatagttggggctatcacttccattaacagtgaactgttaggtctaacacattggacaacaacacctaatttttattactactctatatataattacacaaatgataggactcgtggcactgcaattgacagtaatgatgttgattgtgaacctgtcataacctattctaacataggtgtttgtaaaaatggtgcttttgtttttattaacgtcacacattctgatggagacgtgcaaccaattagcactggtaatgtcacgatacctacaaactttaccatatccgtgcaagtcgaatatattcaggtttacactacaccagtgtcaatagactgttcaagatatgtttgtaatggtaaccctaggtgtaacaaattgttaacacaatacgtttctgcatgtcaaactattgagcaagcacttgcaatgggtgccagacttgaaaacatggaggttgattccatgttgtttgtttctgaaaatgcccttaaattggcatctgttgaagcattcaatagttcagaaactttagaccctatttacaaagaatggcctaatataggtggttcttggctagaaggtctaaaatacatacttccgtcccataatagcaaacgtaagtatcgttcagctatagaggacttgctttttgataaggttgtaacatctggtttaggtacagttgatgaagattataaacgttgtacaggtggttatgacatagctgacttagtatgtgctcaatactataatggcatcatggtgctacctggtgtggctaatgctgacaaaatgactatgtacacagcatcccttgcaggtggtataacattaggtgcacttggtggaggcgccgtggctataccttttgcagtagcagttcaggctagacttaattatgttgctctacaaactgatgtattgaacaaaaaccagcagattctggctagtgctttcaatcaagctattggtaacattacacagtcatttggtaaggttaatgatgctatacatcaaacatcacgaggtcttgctactgttgctaaagcattggcaaaagtgcaagatgttgtcaacatacaagggcaagctttaagccacctaacagtacaattgcaaaataatttccaagccattagtagttctattagtgacatttataataggcttgacgaattgagtgctgatgcacaagttgacaggctgatcacaggaagacttacagcacttaatgcatttgtgtctcagactctaaccagacaagcggaggttagggctagtagacaacttgccaaagacaaggttaatgaatgcgttaggtctcagtctcagagattcggattctgtggtaatggtacacatttgttttcactcgcaaatgcagcaccaaatggcatgattttctttcacacagtgctattaccaacggcttatgaaactgtgactgcttggccaggtatttgtgcttcagatggtgatcgcacttttggacttgtcgttaaagatgtccagttgactttgtttcgtaatctagatgacaagttctatttgacccccagaactatgtatcagcctagagttgcaactagttctgactttgttcaaattgaagggtgcgatgtgctgtttgttaatgcaactgtaagtgatttgcctagtattatacctgattatattgatattaatcagactgttcaagacatattagaaaattttagaccaaattggactgtacctgagttgacatttgacatttttaacgcaacctatttaaacctgactggtgaaattgatgacttagaatttaggtcagaaaagctacataacaccactgtagaacttgccattctcattgacaacattaacaatacattagtcaatcttgaatggctcaatagaattgaaacctatgtaaaatggccttggtatgtgtggctactaataggcttagtagtaatattttgcataccattactgctattttgctgttgtagtacaggttgctgtggatgcataggttgtttaggaagttgttgtcactctatatgtagtagaagacaatttgaaaattacgaaccaattgaaaaagtgcacgtccattaaatttaaaatgttaattctatcatctgctataatagcagttgtttctgctagagaattttgttaaggatgatgaataaagtctttaagaactaaacttacgagtcattacaggtcctgtatggacattgtcaaatccatttacacatccgtagatgctgtacttgacgaacttgattgtgcatactttgctgtaactcttaaagtagaatttaagactggtaaattacttgtgtgtataggttttggtgacacacttcttgctgctaaggataaagcatatgctaagcttggtctctccattattgaagaagtcaatagtcatatagttgtttaatatcattaaacacacaaaacccaaagcattaagtgttacaaaacaattaaagagagattatagaaaaactgtcattctaaattccatgcgaaaatgattggtggactttttcttagtactctgagttttgtaattgttagtaaccattctattgttaataacacagcaaatgtgcatcatatacaacaagaacgtgttatagtacaacagcatcatgttgttagtgctagaacacaaaactattacccagagttcagcatcgctgtactctttgtatcttttctagctttgtaccgtagtacaaactttaagacgtgtgtcggcatcttaatgtttaagattttatcaatgacacttttaggacctatgcttatagcatatggttactacattgatggcattgttacaacaactgtcttatctttaagatttgtctacttagcatacttttggtatgttaatagtaggtttgaatttattttatacaatacaacgacactcatgtttgtacatggcagagctgcaccgtttatgagaagttctcacagctctatttatgtcacattgtatggtggcataaattatatgtttgtgaatgacctcacgttgcattttgtagaccctatgcttgtaagcatagcaatacgtggcttagctcatgctgatctaactgtagttagagcagttgaacttctcaatggtgattttatttatgtattttcacaggagcccgtagtcggtgtttacaatgcagccttttctcaggcggttctaaacgaaattgacttaaaagaagaagaagaagaccatacctatgacgtttcctagggcattgactgtcatagatgacaatggaatggtcattaacatcattttctggttcctgttgataattatattgatattactttcaatagcattgctaaatataattaagctatgcatggtgtgttgcaatttaggaaggacagttattattgttccagcgcaacatgcttacgatgcctataagaattttatgcgaattaaagcatacaaccccgatggagcactccttgcttgaactaaacaaaatgaagattttgttaatattagcgtgtgtgattgcatgcgcatgtggagaacgctattgtgctatgaaatccgatacagatttgtcatgtcgcaatagtacagcgtctgattgtgagtcatgcttcaacggaggcgatcttatttggcatcttgcaaactggaacttcagctggtctataatattgatcgtttttataactgtgctacaatatggaagacctcaattcagctggttcgtgtatggcattaaaatgcttataatgtggctattatggcccgttgttttggctcttacgatttttaatgcatactcggaataccaagtgtccagatatgtaatgttcggctttagtattgcaggtgcaattgttacatttgtactctggattatgtattttgtaagatccattcagttgtacagaaggactaagtcttggtggtctttcaaccctgaaactaaagcaattctttgcgttagtgcattaggaagaagctatgtgcttcctctcgaaggtgtgccaactggtgtcactctaactttgctttcagggaatttgtacgctgaagggttcaaaattgcaggtggtatgaacatcgacaatttaccaaaatacgtaatggttgcattacctagcaggactattgtctacacacttgttggcaagaagttgaaagcaagtagtgcgactggatgggcttactatgtaaaatctaaagctggtgattactcaacagaggcaagaactgataatttgagtgagcaagaaaaattattacatatggtataactaaacttctaaatggccaaccagggacaacgtgtcagttggggagatgaatctaccaaaacacgtggtcgttccaattcccgtggtcggaagaataataacatacctctttcattcttcaaccccataaccctccaacaaggttcaaaattttggaacttatgtccgagagactttgtacccaaaggaataggtaacagggatcaacagattggttattggaatagacaaactcgctatcgcatggtgaagggccaacgtaaagagcttcctgaaaggtggttcttctactacttaggtactggacctcatgcagatgccaaatttaaagataaattagatggagttgtctgggttgccaaggatggtgccatgaacaaaccaaccacgcttggtagtcgtggtgctaataatgaatccaaagctttgaaattcgatggtaaagtgccaggcgaatttcaacttgaagttaatcaatcaagagacaattcaaggtcacgctctcaatctagatctcggtctagaaatagatctcaatctagaggcaggcaacaattcaataacaagaaggatgacagtgtagaacaagctgttcttgccgcacttaaaaagttaggtgttgacacagaaaaacaacagcaacgctctcgttctaaatctaaagaacgtagtaactctaagacaagagatactacacctaagaatgaaaacaaacacacctggaagagaactgcaggtaaaggtgatgtgacaagattttatggagctagaagcagttcagccaattttggtgacactgacctcgttgccaatgggagcagtgccaagcattacccacaactggctgaatgtgttccatctgtgtctagcattctgtttggaagctattggacttcaaaggaagatggcgaccagatagaagtcacgttcacacacaaataccacttgccaaaggatgatcctaagactggacaattccttcagcagattaatgcctatgctcgtccatcagaagtggcaaaagaacagagaaaaagaaaatctcgttctaaatctgcagaaaggtcagagcaagatgtggtacctgatgcattaatagaaaattatacagatgtgtttgatgacacacaggttgagataattgatgaggtaacgaactaaacgagatgctcgtcttcctccatgctgtatttattacagttttaatcttactactaattggtagactccaattattagaaagactattacttaatcactctttcaatcttaaaactgtcaatgactttaatatcttatataggagtttagcagaaaccagattactaaaagtggtgcttcgagtaatctttctagtcttactaggattttgctgctacagattgttagtcacattaatgtaaggcaacccgatgtctaaaactggtttttccgaggaattactggtcatcgcgctgtctactcttgtacagaatggtaagcacgtgtaataggaggtacaagcaaccctattgcatattaggaagtttagatttgatttggcaatgctagatttagtaatttagagaagtttaaagatccgctacgacgagccaacaatggaagagctaacgtctggatctagtgattgtttaaaatgtaaaattgtttgaaaattttccttttgatagtgatacaaaaaa

SEQ ID NO: 90 - DNA, 28586 bp, Coronavirus; identical to SEQ ID NO: 89

SEQ ID NO: 91 - DNA, 20600 bp, Coronavirus
acttttaaagtaaagtgagtgtagcgtggctatatctcttcttttactttaactagccttgtgctagattttgtcttcggacaccaactcgaactaaacgaaatatttgtctttctatgaaatcatagaggacaagcgttgattatttccattcagtttggcaatcactccttggaacggggttgagcgaacggtgcagtagggttccgtccctatttcgtaagtcgcctagtagtagcgagtgcggttccgcccgtacaacgttgggtagaccgggttccgtcctgtgatctccctcgccggccgccaggagaatgagttccaaacaattcaagatccttgttaatgaggactatcaagtcaacgtgcctagtcttcctattcgtgacgtgttacaggaaattaagtactgctaccgtaatggatttgagggctatgttttcgtaccagaatactgtcgtgacctagttgattgcgatcgtaaggatcactacgtcattggtgttcttggtaacggagtaagtgatcttaaacctgttcttcttaccgaaccctccgtcatgttgcaaggctttattgttagagctaactgcaatggcgttcttgaggactttgaccttaaaattgctcgcactggcagaggtgccatatatgttgatcaatacatgtgtggtgctgatggaaaaccagtcattgaaggcgattttaaggactacttcggtgatgaagacatcattgaatttgaaggagaggagtaccattgcgcttggacaactgtgcgcgatgagaaaccgctgaatcagcaaactctctttaccattcaggaaatccaatacaatctggacattcctcataaattgccaaactgtgctactagacatgtagcaccaccagtcaaaaagaactctaaaatagttctgtctgaagattacaagaagctttatgatatcttcggatcaccctttatgggaaatggtgactgtcttagcaaatgctttgacactcttcattttatcgctgctactcttagatgcccgtgtggttctgaaagtagcggcgttggagattggactggttttaagactgcctgttgtggtctttctggcaaagttaagggtgtcactttgggtgatattaagcctggtgatgctgttgtcactagtatgagcgcaggtaagggagttaagttctttgccaattgtgttcttcaatatgctggtgatgttgaaggtgtctccatctggaaagttattaaaacttttacagttgatgagactgtatgcacccctggttttgaaggcgaattgaacgacttcatcaaacctgagagcaaatcactagttgcatgcagcgttaaaagagcattcattactggtgatattgatgatgctgtacatgattgtatcattacaggaaaattggatcttagtaccaacctttttggtaatgttggtctattattcaagaagactccatggtttgtacaaaagtgtggtgcactttttgtagacgcttggaaagtagtagaggagctttgtggttcactcacacttacatacaagcaaatttatgaagttgtagcatcactttgcacttctgcttttacgattgtaaactacaagccaacatttgtggttccagacaatcgtgttaaagatcttgtagacaagtgtgtgaaagttcttgtaaaagcatttgatgtttttacgcagattatcacaatagctggtattgaggccaaatgctttgtgcttggtgctaaatacctgttgttcaataatgcacttgtcaaacttgtcagtgttaaaatccttggcaagaagcaaaagggtcttgaatgtgcattctttgctactagcttggttggtgcaactgttaatgtgacacctaaaagaacagagactgccactatcagcttgaacaaggttgatgatgttgtagcaccaggagagggttatatcgtcattgttggtgatatggctttctacaagagtggtgaatattatttcatgatgtctagtcctaattctgttcttactaacaatgtttttaaagcagttaaagttccatcttatgacatcgtttatgatgttgataatgataccaaaagcaaaatgattgcaaaacttggttcatcatttgaatatgatggtgatattgatgctgctattgtaaaagtcaatgaactactcattgaatttaggcagcaaagcttgtgcttcagagcttttaaggacgacaaaagcatttttgttgaagcctattttaaaaagtataaaatgccagcatgccttgcaaaacatattggtttgtggaacatcataaagaaagattcatgtaagaggggttttcttaatctcttcaatcacttgaatgaattggaagatatcaaagaaactaatattcaggctattaaaaacattctttgccctgatcctcttcttgatctggattatggtgccatttggtacaattgcatgccaggttgctctgatccttcagttttggggagtgttcaacttttgatcggtaatggtgtgaaagtagtttgtgatggctgcaaaggttttgctaaccaactttcaaaaggttacaacaagctctgtaacgcggctcgcaatgatattgagatcggtggtataccattttccacttttaaaacacctacaaatacttttattgaaatgacagatgctatctattcagttattgaacaaggtaaggcattatcctttagagatgctgatgtgccagttgtagacaatggtaccatttctactgctgattggtctgaacccattctgcttgaacctgctgaatatgtaaaaccaaagaacaatggtaatgtcattgttattgcaggttatacattttataaagatgaggatgaacatttttatccttatggttttggtaaaattgtgcagagaatgtataataaaatgggtggtggtgacaaaactgtctcattttcagaagaagtagatgttcaagaaattgcacctgttacacgtgttaaacttgaattcgaatttgacaatgaaattgtaactggtgttcttgaacgggctattggtactagatacaaatttactggtacaacttgggaagaatttgaagagtctatttctgaagaactcgatgcaatctttgatactctagcaaaccaaggtgtcgaacttgaaggttacttcatttatgacacttgtggtggctttgatataaaaaatccagatggtattatgatctctcagtatgatatcaatattactgctgatgaaaaatcagaagttagtgcatcaagtgaagaagaagaagttgaatctgttgaagaagatcctgagaatgaaattgtagaagcatctgaaggtgctgaagggacttcttctcaagaagaggttgaaacagtagaagttgcagatattacttctacagacgaagatgttgacattgttgaagtatctgctaaagatgacccttgggctgcagctgttgatgtacaagaagctgaacaatttaatccttctctaccacctttcaagacaacgaatctcaacggaaaaattatccttaagcaaggggataataattgttggataaatgcttgttgctatcagcttcaggcctttgattttttcaacaatgaagcttgggagaaatttaagaaaggtgatgtcatggactttgtaaacctttgttatgcagcaacaacactagcaagaggtcattctggtgatgcagagtatcttcttgaacttatgctcaatgattatagcacagccaagatagtacttgcagctaagtgtggttgtggtgaaaaagaaattgttttggaaagagctgtttttaaactcaccccacttaaggagagttttaattatggtgtttgtggtgactgcatgcaagttaacacctgtagatttttaagtgttgaaggctctggtgtttttgttcatgacatattaagcaagcaaacgccagaagctatgtttgttgtcaaacctgttatgcatgcagtttacactggcacaactcaaaatggccattacatggttgatgatattgaacacggttattgtgtagatggtatgggtattaaaccacttaagaaacggtgttatacatccacattgttcattaatgccaatgtaatgactagagctgaaaaaccaaaacaagagtttaaagttgaaaaagtagaacagcaaccgatagtggaggaaaacaaatcctctattgaaaaagaggaaattcaaagtcctaaaaacgatgaccttatacttccattttacaaagctggtaaactttccttttatcagggtgctttggatgttttgatcaatttcttggaacctgatgttattgttaatgctgctaatggtgatcttaaacacatgggtggtgtcgcaagagccatcgatgttttcactggtggcaaattaacagaacgttctaaggattatcttaaaaagaacaaatctattgctcctggtaatgctgttttctttgaaaatgtcattgagcatcttagtgttttgaatgcagttggaccacgtaatggtgacagccgagttgaagccaaactttgtaatgtttacaaagcaattgcaaagtgtgaaggaaaaatattaacaccacttattagtgttggtatctttaatgttagacttgaaacatcattgcagtgcttacttaagactgtgaatgacaggggattgaatgtcttcgtatacactgaccaggagaggcaaactattgagaatttcttctcttgttctatccctgtcaatgttactgaggataatgttaaccatgaacgtgtgtctgtttcttttgacaaaacatacggtgaacagcttaagggcaccgttgtcatcaaagacaaagatgttacaaaccagttgcctagcgcttttgatgttggtcaaaaagttattaaggctattgatatagattggcaagctcattatggtttccgtgatgctgctgcttttagcgctagtagtcatgatgcttataaatttgaagttgttacacatagcaatttcattgtgcataagcagactgacaacaactgttggattaatgcaatttgtcttgcattacagagactcaagccacagtggaaatttcctggtgttagaggtctctggaatgaatttcttgagcgtaaaacacaaggttttgtacatatgttgtatcacatttctggagtaaagaaaggtgagccaggtgatgctgaattaatgctgcataaacttggtgacttgatggacaatgattgtgaaatcattgtcacacacactacagcatgtgacaagtgcgcaaaagtagaaaagtttgttggaccagtggtagcagcacctcttgcaattcatggcactgacgaaacatgtgtgcatggcgttagtgtcaatgtcaaagtcacccaaattaagggcactgttgctattacttctttgattggtcctattattggagaagtactagaagcaactggttatatttgttatagcggttctaacaggaatggtcattacacctattacgataaccgtaatggattagtggttgatgcagaaaaggcttaccattttaatagagacttattacaggtcacaacagctattgcaagtaatttcgttgtcaagaaaccacaagcagaggaaagacctaagaattgtgcttttaacaaagttgcagcatctcctaagattgtacaagaacaaaaattgttggctattgaaagtggtgctaactatgctcttactgaatttggaagatatgctgacatgttctttatggctggagataaaattcttaggttgctgcttgaagtctttaaatatttgctggttttatttatgtgtcttagaagtactaagatgcctaaagttaaagtcaaaccacctcttgcatttaaagattttggtgctaaggtcagaacgctcaattacatgagacaattgaacaaaccctctgtctggcgttacgcaaaactagttttattgttgatagcaatatataatttcttttatttgtttgtcagtataccagtagtgcataaattaacatgtaacggtgctgtacaggcatataaaaattctagttttataaagtctgcagtctgtggcaactctattttatgcaaagcctgtttggcttcttatgatgagttggctgattttcaacatctccaagttacttgggatttcaaatctgacccactatggaacagactggtacaattgtcttactttgcattcttggctgtttttggtaataactatgttaggtgttttcttatgtattttgtatctcagtacctcaacctttggctttcttattttggttatgtagagtacagttggtttttgcatgttgtcaactttgaatccatctcagctgagtttgtgatcgtagttatagtggttaaggcagttctcgcccttaaacatattgttttcgcatgctcaaacccgtcttgcaaaacgtgctctaggactgcaaggcagacacgtattcctattcaagttgttgttaatggttcaatgaagactgtttatgttcatgctaatggtactggtaaattctgcaagaaacacaatttttattgtaagaactgtgattcttatggctttgaaaacacattcatctgtgacgaaattgtacgtgatctcagtaatagtgttaaacaaactgtttacgccactgatagatctcatcaagaagtcacaaaagttgaatgttcagatggcttttacagattttatgttggtgatgaattcacttcatatgactatgatgtaaaacacaagaaatacagtagtcaagaggttctcaagagcatgctcttgcttgatgacttcattgtgtacagtccatctggttctgctcttgcaaatgttagaaatgcctgtgtttatttttcacaacttattggtaagcctattaagattgttaacagtgatttgcttgaagacctctctgtagattttaaaggggcactttttaatgctaaaaagaatgtaattaagaattctttcaatgttgatgtctcagaatgcaaaaatcttgacgaatgttacagggcttgcaatcttaatgtttcattttctacatttgaaatggctgtcaacaatgctcataggtttggtattctgattactgatcgttcttttaacaatttctggccatcaaaagttaagcctggttcatctggtgtgtcggccatggacattggtaagtgtatgacttctgatgctaagattgttaatgctaaagttttaactcaacgtggtaaaagtgttgtttggcttagccaggattttgctgcacttagctcaactgctcagaaagttttggttaaaacttttgtagaagaaggtgtcaacttttcactcacatttaatgctgtaggttcagatgatgatcttacttatgaaagattcactcaatctgtgtctccaaaaagtggctcaggctttttcgatgtaattacacagcttaaacaaattgtgattttggtttttgtttttatctttatttgtggtttgtgctctgtttacagtgttgctacacagtcctacattgaatctgctgaaggctatgactacatggttattaagaatggaattgttcaaccttttgacgataccatttcatgtgttcataacacttataaaggattcggtgactggtttaaagctaagtatggttttatccctacttttggtaaatcatgtccaattgttgtaggaactgtttttgatcttgaaaatatgagaccaattcctgacgtgcctgcatatgtttctattgtgggtagatctcttgttttcgctattaatgctgcttttggtgttactaatatgtgctatgatcatactggcaatgcagttagtaaggactcttactttgatacttgtgtgtttaatactgcgtgcaccactcttacaggtcttggtggtacaattgtatattgtgcaaagcaaggtttagttgaaggtgctaagctctatagtgatcttatgccagactattattatgagcatgctagtggtaacatggttaaattgccagcaattattagaggacttggtctacgttttgtgaaaacacaggctacaacttattgtagagtgggagagtgcattgatagtaaagctggtttttgctttggtggcgataactggtttgtctacgacaatgagtttggcaatggatacatctgtggtaattctgtgctaggattctttaagaatgtcttcaaactctttaactctaacatgtctgtggtagctacatctggtgcgatgcttgttaacattattattgcatgcttagctattgcaatgtgttatggtgttcttaagtttaagaagatttttggtgattgtactttcctcattgttatgatcattgtcacccttgttgtgaacaatgtgtcttattttgtcactcaaaacacgttctttatgatcatctacgccattgtttactattttataacaagaaaacttgcatacccaggcattcttgatgctgggtttattattgcttatattaatatggctccatggtacgtgattaccgcatatatcctagttttcctctatgactcactcccttcactgtttaaacttaaagtttcaacaaatctttttgaaggtgataaatttgtgggtaactttgaatctgctgctatgggtacttttgttattgacatgcgttcatatgaaactattgttaattctacttctattgctagaattaaatcatatgctaacagcttcaataaatataagtactacacaggttcaatgggagaagctgactacagaatggcttgctatgctcatcttggtaaagctcttatggactattctgttaatagaacagacatgctttacacacctcctactgttagtgttaattctacacttcagtcaggtttgcggaaaatggcacagcctagtggtcttgtagagccttgcattgtaagagtttcctatggtaacaatgtgcttaatggtttatggttaggagatgaagtcatttgccctagacatgttattgctagtgataccacacgtgttatcaactatgaaaatgaaatgtctagtgtgagacttcacaacttttcagtttctaagaataatgtgtttttgggtgttgtgtctgccagatataagggtgtgaatcttgtacttaaagtcaaccaggttaatcctaacacaccagaacataaatttaagtctattaaagctggtgaaagttttaacattcttgcttgttatgaaggatgtcctggcagtgtttatggtgtcaacatgagaagtcaaggtaccattaaaggatcttttatagctggtacttgtggatcagtaggttatgtgttagaaaatggaattctctattttgtatacatgcatcacttagaacttggaaatggctcgcatgttggttccaattttgaaggagaaatgtacggtggttatgaagatcaacctagcatgcaattggaaggtactaatgtcatgtcatcagataatgtggttgcattcctatatgctgcacttatcaatggtgaaaggtggtttgttacaaacacatcgatgtcattagaatcatacaatacatgggccaaaactaacagtttcacagaactttcttcaactgatgcttttagcatgttggctgcaaaaactggtcaaagtgttgagaaattactagatagcatcgtaagactcaacaagggttttggaggtcgtactatactttcttatggctcattgtgtgacgagttcactccaactgaagtcataaggcaaatgtatggtgtaaatcttcaggctggtaaagtaaaatctttcttctaccctattatgactgcaatgacaattctctttgccttttggcttgaattctttatgtacacacccttcacttggattaatccaacttttgttagcattgtattggctgttacaactttgatctcgacggtttttgtctctggcatcaaacataagatgttgttctttatgtcttttgtccttcctagtgttatccttgtgacagcacacaatttgttctgggacttttcttactatgaaagtcttcagtcaattgttgagaatactaacactatgtttttgcctgttgacatgcaaggtgtcatgctcacagtgttttgctttattgtctttgttacatatagtgttagattcttcacttgcaaacaatcatggttctcacttgctgtgacaactattcttgtgatctttaacatggttaaaatctttggaacatctgatgaaccatggactgaaaaccaaattgctttctgctttgtgaacatgcttactatgattgtcagtcttactacaaaggattggatggttgtcattgcatcatacagaattgcatattatattgttgtatgtgtaatgccatctgcttttgtatctgactttgggtttatgaagtgtattagcattgtttacatggcgtgcggttatttgttttgttgctattatggcattctttattgggttaacagatttacatgcatgacttgtggtgtttatcaattcactgtgtctgcagctgaacttaaatacatgaccgctaacaacctttctgcacctaagaacgcatatgacgctatgattcttagtgctaaattgattggtgttggaggtaagagaaacatcaaaatttcaactgtacagtcaaaacttacagagatgaaatgtaccaatgttgtcttgcttggtcttttatctaaaatgcatgtcgagtctaactcaaaagagtggaactattgtgttggactacacaatgagataaacctttgtgacgatcctgaaatcgttcttgagaaactgttagctcttattgcattcttcttgtccaaacataacacttgtgaccttagcgaacttattgaatcatactttgagaacaccaccatactccagagtgtggcttcagcttatgctgcattgcctagctggattgcacttgaaaaagctcgcgctgatcttgaagaggctaagaaaaatgatgttagccctcaaattttgaagcagcttactaaagcatttaacattgccaagagtgattttgagcgcgaagcatcagtgcaaaagaaactcgacaaaatggctgagcaggctgcagctagtatgtataaagaagcacgagctgtggacagaaagtcaaagattgtttctgctatgcatagcctactttttggtatgcttaagaaacttgatatgtccagtgtcaacactattattgaccaggctcgtaatggtgttctacctttaagtatcattccagctgcatcagctacaagacttgttgttattacacctagccttgaagtgttttccaagattaggcaagaaaacaatgttcattatgctggtgctatttggactattgttgaagttaaagatgctaatggttcacatgtacatcttaaggaagttaccgctgctaatgaattaaaccttacttggccattgagcattacttgtgagagaaccacaaagcttcagaacaatgaaattatgccaggtaaacttaaagaaagagctgtcagagcgtcagcaactcttgatggtgaagctttcggcagtggaaaggctcttatggcatctgaaagtggaaaaagctttatgtatgcatttatagcctcagacaacaatcttaagtatgttaagtgggagagcaataatgatattatacctattgaacttgaagctccattgcgtttctatgttgacggcgctaatggtcctgaagtcaagtatttgtattttgtcaagaatttaaacactcttagacgtggtgccgttcttggttatatcggtgcaacagttcgtctgcaagctggtaaacccactgaacatccatctaacagtagtttattgacattgtgtgctttttcacctgatcctgctaaagcatatgttgatgctgttaagagaggcatgcaaccagttaataactgtgtaaaaatgctctcaaatggtgctggtaatggtatggctgttacaaacggtgtcgaagctaacacacaacaggactcttatggtggtgcttcagtttgtatttattgcagatgccatgttgaacatcctgctattgatggattatgccgctacaaaggtaagttcgtgcaaataccaactggcacacaagatccaattcggttctgtattgaaaatgaagtttgtgttgtctgtggttgttggcttaacaatggttgcatgtgcgatcgtacttctatgcagagttttactgttgatcaaagttatttaaacgagtgcggggttctagtgcagctcgactagaaccctgcaatggtactgatccagaccatgttagtagagcttttgacatctacaacaaagatgttgcgtgtattggtaaattccttaagacgaattgttcaagatttaggaatttggacaaacatgatgcctactacattgtcaaacgttgtacaaagaccgttatggaccatgagcaagtctgttataacgatcttaaagattctggtgctgttgctgagcatgacttcttcacatataaagagggtagatgtgagttcggtaatgttgcacgtaggaatcttacaaagtacacaatgatggatctttgttacgctatcagaaattttgatgaaaagaactgtgaagttctcaaagaaatactcgtgacagtaggtgcttgcactgaagaattctttgaaaataaagattggtttgatccagttgaaaatgaagccatacatgaagtttatgcaaaacttggacccattgtagccaatgctatgcttaaatgtgttgctttttgcgatgcgatagtggaaaaaggctatataggtgttataacacttgacaaccaagatcttaatggcaatttctacgatttcggcgatttcgtgaagactgctccgggttttggttgcgcttgtgttacatcatattattcttatatgatgcctttaatggggatgacttcatgcttagagtctgaaaactttgtgaaaagtgacatctatggttctgattataagcagtatgatttactagcttatgattttaccgaacataaggagtaccttttccaaaaatactttaagtactgggatcgcacatatcacccaaattgttctgattgtactagtgacgagtgtattattcattgtgctaattttaacacattgttttctatgacaataccaatgacagcttttggaccacttgtccgtaaagttcatattgatggtgtaccagtagttgttactgcaggttaccatttcaaacaacttggtatagtatggaatcttgatgtaaaattagacacaatgaagttgagcatgactgatcttcttagatttgtcacagatccaacacttcttgtagcatcaagccctgcacttttagaccagcgtactgtctgtttctccattgcagctttgagtactggtattacatatcagacagtaaaaccaggtcactttaacaaagatttctacgatttcataacagagcgtggattctttgaagagggatctgagttaacattaaaacattttttctttgcacagggtggtgaagctgctatgacagacttcaattattatcgctacaatagagtcacagtacttgatatttgccaagctcaatttgtttacaaaatagttggcaagtattttgaatgttatgacggtgggtgcattaatgctcgtgaagttgttgttacaaactatgacaagagtgctggctatcctttgaacaaatttggtaaagctagactttactacgaaactctttcatatgaagagcaggatgcactttttgctttaacaaagagaaatgttttacccacaatgactcaaatgaatttgaaatacgctatttctggtaaggcaagagctcgtacagtaggaggagtttcacttctttctaccatgactacgagacaatatcatcagaagcatttgaagtcaattgctgcaacacgcaatgctactgtggtcattggttcaaccaagttttatggtggttgggacaatatgcttaaaaatttaatgcgtgatgttgataatggttgtttgatgggatgggactatcctaagtgtgaccgtgctttacctaatatgattagaatggcttctgccatgatattaggttctaagcatgttggttgttgtacacataatgataggttctaccgcctctccaatgagttagctcaagtactcacagaagttgtgcattgcacaggtggtttttattttaaacctggtggtacaactagcggtgatggtactacagcatatgctaactctgcttttaacatctttcaagctgtttctgctaatgttaataagcttttgggggttgattcaaacgcttgtaacaacgttacagtaaaatccatacaacgtaaaatttacgataattgttatcgtagtagcagcattgatgaagaatttgttgttgagtactttagttatttgagaaaacacttttctatgatgattttatctgatgatggagttgtgtgctacaacaaagattatgcggatttaggttatgtagctgacattaatgcttttaaagcaacactttattaccagaataacgtctttatgtccacttctaagtgttgggtagaaccagatcttagtgttggaccacatgaattttgttcacagcatacattgcagattgttgggcctgatggagactactatcttccctatccagacccgtccagaattttatcagctggtgtgtttgttgatgacatagttaaaacagacaatgttattatgttagaacgttacgtgtcattggctattgacgcatacccgctcacaaaacaccctaagcctgcttatcaaaaagtgttttacactctactagattgggttaaacatctacagaaaaatttgaatgcaggtgttcttgattcgttttcagtgacaatgttagaggaaggtcaagataagttctggagtgaagagttttacgctagcctctatgaaaagtccactgtcttgcaagctgcaggcatgtgtgtagtatgtggttcgcaaactgtacttcgttgtggagactgtcttaggagaccacttttatgcacgaaatgtgcttacgaccatgttatgggaacaaagcataaattcattatgtctatcacaccatatgtgtgtagttttaatggttgtaatgtcaatgatgttacaaagttgtttttaggtggtcttagttattattgtatgaaccacaaaccacagttgtcattcccactctgtgctaatggcaacgtttttggtctatataaaagtagtgcagtcggctcagaggctgttgaagatttcaacaaacttgcagtttctgactggactaatgtagaagactacaaacttgctaacaatgtcaaggaatctctgaaaattttcgctgctgaaactgtgaaagctaaggaggagtctgttaaatctgaatatgcttatgctgtattaaaggaggttatcggccctaaggaaattgtactccaatgggaagcttctaagactaagcctccacttaacagaaattcagttttcacgtgttttcagataagtaaggatactaaaattcaattaggtgaatttgtgtttgagcaatctgagtacggtagtgattctgtttattacaagagcacgagtacttacaaattgacaccaggtatgatttttgtgttgacttctcataatgtgagtcctcttaaagctccaattttagtcaaccaagaaaagtacaataccatatctaagctctatcctgtctttaatatagcggaggcctataatacactggttccttactaccaaatgataggtaagcaaaaatttacaactatccaaggtcctcctggtagcggtaaatctcattgtgttataggtttgggtttgtattaccctcaggcgagaatagtctacactgcatgttctcatgcggctgtagacgctttatgtgaaaaagcagccaaaaacttcaatgttgatagatgttcaaggataatacctcaaagaatcagagttgattgttacacaggctttaaggctaataacaccaatgcgcagtacttgttttgtactgttaatgctctaccagaagcaagttgtgacattgttgtagttgatgaggtctctatgtgtactaattatgatcttagtgtcataaatagccgactgagttacaaacatattgtttatgttggagacccacagcagctaccagctcctagaactttgattaataagggtgtacttcaaccgcaggattacaatgttgtaaccaaaagaatgtgcacactaggacctgatgtctttttgcataaatgttacaggtgcccagctgaaattgttaagacagtctctgcacttgtttatgaaaataaatttgtacctgtcaacccagaatcaaagcagtgcttcaaaatgtttgtaaaaggtcaggttcagattgagtctaactcttctataaacaacaagcaactagaggttgtcaaggcctttttagcacataatccaaaatggcgtaaagctgttttcatctcaccctataatagtcaaaattatgttgctcggcgtcttcttggtttgcaaacgcaaactgtggattccgctcagggtagtgagtatgattacgtcatctacacacagacctccgatacacagcatgctactaatgttaacagatttaatgttgccattacgagagcaaaggttggtatactttgtatcatgtgtgatagaactatgtatgagaatcttgatttctatgaactcaaagattcaaagattggtttacaagcaaaacctgaaacttgtggtttatttaaagattgttcgaagagcgaacaatacataccacctgcttatgcaacgacatatatgagcttatctgataattttaagacaagtgatggtttagctgttaacatcggtacaaaagatgttaaatatgctaatgtcatctcatatatgggattcaggtttgaagccaacataccaggctatcacacactattctgcacgcgagattttgctatgcgtaatgttagagcatggcttgggtttgacgttgaaggtgcacatgtctgtggtgataatgttggaactaatgtaccattacagctgggtttctcaaacggtgtggattttgtagtgcaaactgaaggatgtgttattactgaaaaaggtaatagcattgaggttgtaaaagcacgagcaccaccaggtgagcaatttgcacacttgattccgcttatgagaaagggtcaaccttggcacattgttagacgccgtatagtgcagatggtctgtgactattttgatggcttatcagacattctgatctttgtgctttgggctggtggtcttgaacttacaactatgagatactttgttaaaattggaagaccacaaaaatgtgaatgcggcaaaagtgcaacttgttatagtagctctcaatctgtttatgcttgcttcaagcatgcattaggatgtgattatttatataacccttactgcattgacatacagcaatggggttacacaggatctttgagcatgaatcatcatgaagtttgcaacattcatagaaatgagcatgtagctagtggtgatgctatcatgactagatgtctcgctatacatgactgttttgtcaaacgtgttgattggtcaattgtgtacccttttattgacaatgaagaaaagatcaataaagctggtcgcatagtgcagtcacatgtcatgaaagctgctctgaagatttttaatcctgctgcaattcacgatgtgggtaatccaaaaggcatccgttgtgctacaacaccaataccatggttttgttatgatcgtgatcctattaataacaatgttagatgtctggattatgactatatggtacatggtcaaatgaatggtcttatgttattttggaactgtaatgtagacatgtacccagagttttcaattgtttgtagatttgatactcgcactcgctctaaattgtctttagaaggttgtaatggtggtgcattgtatgttaataaccatgctttccacacaccagcttatgatagaagagcttttgctaagcttaaacctatgccattcttttactatgatgatagtaattgtgaacttgttgatgggcaacctaattatgtaccacttaagtcaaatgtttgcataacaaaatgcaacattggtggtgctgtctgcaagaagcatgctgctctttacagagcgtatgttgaggattacaacatttttatgcaggctggttttacaatatggtgtcctcaaaactttgacacctatatgctttggcatggttttgttaatagcaaagcacttcagagtctagaaaatgtggcttttaatatcgttaagaaaggtgccttcaccggtttaaaaggtgacttaccaactgctgttattgctgacaaaataatggtaagagatggacctactgacaaatgtatttttacaaataagactagtttacctacaaatgtagcttttgagttatatgcaaaacgcaaacttggactcacacctccattaacaatacttaggaatttaggtgttgtcgcaacatataagtttgtgttgtgggattatgaagctgaacgtcctttctcaaatttcactaagcaagtgtgttcctacactgatcttgatagtgaagttgtaacatgttttgataatagtattgctggttcttttgagcgttttactactacaagagatgcagtgcttatttctaataacgctgtgaaagggcttagtgccattaaattacaatatggccttttgaatgatctacctgtaagtactgttggaaataaacctgtcacatggtatatctatgtgcgcaagaatggtgagtacgtcgaacaaatcgatagttactatacacagggacgtacttttgaaaccttcaaacctcgtagtacaatggaagaagattttcttagtatggatactacactcttcatccaaaagtatggtcttgaggattatggttttgaacacgttgtatttggagatgtctctaaaactaccattggtggtatgcatcttcttatatcgcaagtgcgccttgcaaaaatgggtttgttttccgttcaagaatttatgaataattctgacagtacactgaaaagttgttgtattacatatgctgatgatccatcttctaagaatgtgtgcacttatatggacatactcttggacgattttgtgactatcattaagagcttagatcttaatgttgtgtccaaagttgtggatgtcattgtagattgtaaggcatggagatggatgttgtggtgtgagaattcacatattaaaaccttctatccacaactccaatctgctgaatggaatcccggctatagcatgcctacactgtacaaaatccagcgtatgtgtctcgaacggtgtaatctctacaattatggtgcacaagtgaaattacctgtaggcattactactaagttcgttaagtatactcagttgtgtcaataccttaacactactacattgtgtgtaccacacaaaatgcgtgtattgcatttaggagctgctggtgcatctggtgttgctcctggtagtactgtattaagaagatggttaccagatgatgccatattggttgataatgatttgagagattacgtttccgacgcagacttcagtgttacaggtgattgtactagtctttacatcgaagacaagtttgatttgctcgtctctgatttatatgatggctccacaaaatcaattgacggtgaaaacacgtcgaaagatggtttctttacttatattaatggtttcattaaagagaaactgtcacttggtggatctgttgccattaaaatcacggaatttagttggaataaagatttatatgaattgattcaaagatttgagtattggactgtgttttgtacaagtgttaacacgtcatcatcagaaggctttctgattggtattaactacttaggaccatactgtgacaaagcaatagtagatggaaatataatgcatgccaattatatattttggagaaactctacaattatggctctatcacataactcagtcctagacactcctaaattcaagtgtcgttgtaacaacgcacttattgttaatttaaaagaaaaagaattgaatgaaatggtcattggattactaaggaagggtaagttgctcattagaaataatggtaagttactaaactttggtaacacttcgttaacacaccatgaaaaaactatttgtggttttggtcgtaatgccattgatttatggagacaattttccttgttctaaattgactaatagaactataggcaaccagtggaatctcattgaaaccttccttctaaactatagtagtaggttaccacctaattcagatgtggtgttaggtgattattttcctactgtacaaccttggtttaattgcattcgcaataatagtaatgacctttatgttaca

SEQ ID NO: 92 - DNA, 9714 bp, Coronavirus
acttttaaagtaaagtgagtgtagcgtggctatatctcttcttttactttaactagccttgtgctagattttgtcttcggacaccaactcgaactaaacgaaatatttgtctttctatgaaatcatagaggacaagcgttgattatttccattcagtttggcaatcactccttggaacggggttgagcgaacggtgcagtagggttccgtccctatttcgtaagtcgcctagtagtagcgagtgcggttccgcccgtacaacgttgggtagaccgggttccgtcctgtgatctccctcgccggccgccaggagaatgagttccaaacaattcaagatccttgttaatgaggactatcaagtcaacgtgcctagtcttcctattcgtgacgtgttacaggaaattaagtactgctaccgtaatggatttgagggctatgttttcgtaccagaatactgtcgtgacctagttgattgcgatcgtaaggatcactacgtcattggtgttcttggtaacggagtaagtgatcttaaacctgttcttcttaccgaaccctccgtcatgttgcaaggctttattgttagagctaactgcaatggcgttcttgaggactttgaccttaaaattgctcgcactgtcagaggtgccatatatgttgatcaatacatgtgtggtgctgatggaaaaccagtcattgaaggcgattttaaggactacttcggtgatgaagacatcattgaatttgaaggagaggagtaccattgcgcttggacaactgtgcgcgatgagaaaccgctgaatcagcaaactctctttaccattcaggaaatccaatacaatctggacattcctcataaattgccaaactgtgctactagacatgtagcaccaccagtcaaaaagaactctaaaatagttctgtctgaagattacaagaagctttatgatatcttcggatcaccctttatgggaaatggtgactgtcttagcaaatgctttgacactcttcattttatcgctgctactcttagatgcccgtgtggttctgaaagtagcggcgttggagattggactggttttaagactgcctgttgtggtctttctggcaaagttaagggtgtcactttgggtgatattaagcctggtgatgctgttgtcactagtatgagcgcaggtaagggagttaagttctttgccaattgtgttcttcaatatgctggtgatgttgaaggtgtctccatctggaaagttattaaaacttttacagttgatgagactgtatgcacccctggttttgaaggcgaattgaacgacttcatcaaacctgagagcaaatcactagttgcatgcagcgttaaaagagcattcattactggtgatattgatgatgctgtacatgattgtatcattacaggaaaattggatcttagtaccaacctttttggtaatgttggtctattattcaagaagactccatggtttgtacaaaagtgtggtgcactttttgtagacgcttggaaagtagtagaggagctttgtggttcactcacacttacatacaagcaaatttatgaagttgtagcatcactttgcacttctgcttttacgattgtaaactacaagccaacatttgtggttccagacaatcgtgttaaagatcttgtagacaagtgtgtgaaagttcttgtaaaagcatttgatgtttttacgcagattatcacaatagctggtattgaggccaaatgctttgtgcttggtgctaaatacctgttgttcaataatgcacttgtcaaacttgtcagtgttaaaatccttggcaagaagcaaaagggtcttgaatgtgcattctttgctactagcttggttggtgcaactgttaatgtgacacctaaaagaacagagactgccactatcagcttgaacaaggttgatgatgttgtagcaccaggagagggttatatcgtcattgttggtgatatggctttctacaagagtggtgaatattatttcatgatgtctagtcctaattttgttcttactaacaatgtttttaaagcagttaaagttccatcttatgacatcgtttatgatgttgataatgataccaaaagcaaaatgattgcaaaacttggttcatcatttgaacaaataccaactggcacacaagatccaattcggttctgtattgaaaatgaagtttgtgttgtctgtggttgttggcttaacaatggttgcatgtgcgatcgtacttctatgcagagttttactgttgatcaaagttatttaaacgagtgcggggttctagtgcagctcgactagaaccctgcaatggtactgatccagaccatgttagtagagcttttgacatctacaacaaagatgttgcgtgtattggtaaattccttaagacgaattgttcaagatttaggaatttggacaaacatgatgcctactacattgtcaaacgttgtacaaagaccgttatggaccatgagcaagtctgttataacgatcttaaagattctggtgctgttgctgagcatgacttcttcacatataaagagggtagatgtgagttcggtaatgttgcacgtaggaatcttacaaagtacacaatgatggatctttgttacgctatcagaaattttgatgaaaagaactgtgaagttctcaaagaaatactcgtgacagtaggtgcttgcactgaagaattctttgaaaataaagattggtttgatccagttgaaaatgaagccatacatgaagtttatgcaaaacttggacccattgtagccaatgctatgcttaaatgtgttgctttttgcgatgcgatagtggaaaaaggctatataggtgttataacacttgacaaccaagatcttaatggcaatttctacgatttcggcgatttcgtgaagactgctccgggttttggttgcgcttgtgttacatcatattattcttatatgatgcctttaatggggatgacttcatgcttagagtctgaaaactttgtgaaaagtgacatctatggttctgattataagcagtatgatttactagcttatgattttaccgaacataaggagtaccttttccaaaaatactttaagtactgggatcgcacatatcacccaaattgttctgattgtactagtgacgagtgtattattcattgtgctaattttaacacattgttttctatgacaataccaatgacagcttttggaccacttgtccgtaaagttcatattgatggtgtaccagtagttgttactgcaggttaccatttcaaacaacttggtatagtatggaatcttgatgtaaaattagacacaatgaagttgagcatgactgatcttcttagatttgtcacagatccaacacttcttgtagcatcaagccctgcacttttagaccagcgtactgtctgtttctccattgcagctttgagtactggtattacatatcagacagtaaaaccaggtcactttaacaaggatttctacgatttcataacagagcgtggattctttgaagagggatctgagttaacattaaaacattttttctttgcacagggtggtgaagctgctatgacagacttcaattattatcgctacaatagagtcacagtacttgatatttgccaagctcaatttgtttacaaaatagttggcaagtattttgaatgttatgacggtgggtgcattaatgctcgtgaagttgttgttacaaactatgacaagagtgctggctatcctttgaacaaatttggtaaagctagactttactacgaaactctttcatatgaagagcaggatgcactttttgctttaacaaagagaaatgttttacccacaatgactcaaatgaatttgaaatacgctatttctggtaaggcaagagctcgtacagtaggaggagtttcacttctttctaccatgactacgagacaatatcatcagaagcatttgaagtcaattgctgcaacacgcaatgctactgtggtcattggttcaaccaagttttatggtggttgggacaatatgcttaaaaatttaatgcgtgatgttgataatggttgtttgatgggatgggactatcctaagtgtgaccgtgctttacctaatatgattagaatggcttctgccatgatattaggttctaagcatgttggttgttgtacacataatgataggttctaccgcctctccaatgagttagctcaagtactcacagaagttgtgcattgcacaggtggtttttattttaaacctggtggtacaactagcggtgatggtactacagcatatgctaactctgcttttaacatctttcaagctgtttctgctaatgttaataagcttttgggggttgattcaaacgcttgtaacaacgttacagtaaaatccatacaacgtaaaatttacgataattgttatcgtagtagcagcattgatgaagaatttgttgttgagtactttagttatttgagaaaacacttttctatgatgattttatctgatgatggagttgtgtgctacaacaaagattatgcggatttaggttatgtagctgacattaatgcttttaaagcaacactttattaccagaataacgtctttatgtccacttctaagtgttgggtagaaccagatcttagtgttggaccacatgaattttgttcacagcatacattgcagattgttgggcctgatggagactactatcttccctatccagacccgtccagaattttgtcagctggtgtgtttgttgatgacatagttaaaacagacaatgttattatgttagaacgttacgtgtcattggctattgacgcatacccgctcacaaaacaccctaagcctgcttatcaaaaagtgttttacactctactagattgggttaaacatctacagaaaaatttgaatgcaggtgttcttgattcgttttcagtgacaatgttagaggaaggtcaagataagttctggagtgaagagttttacgctagcctctatgaaaagtccactgtcttgcaagctgcaggcatgtgtgtagtatgtggttcgcaaactgtacttcgttgtggagactgtcttaggagaccacttttatgcacgaaatgtgcttacgaccatgttatgggaacaaagcataaattcattatgtctatcacaccatatgtgtgtagttttaatggttgtaatgtcaatgatgttacaaagttgtttttaggtggtcttagttattattgtatgaaccacaaaccacagttgtcattcccactctgtgctaatggcaacgtttttggtctatataaaagtagtgcagtcggctcagaggctgttgaagatttcaacaaacttgcagtttctgactggactaatgtagaagactacaaacttgctaacaatgtcaaggaatctctgaaaattttcgctgctgaaactgtgaaagctaaggaggagtctgttaaatctgaatatgcttatgctgtattaaaggaggttatcggccctaaggaaattgtactccaatgggaagcttctaagactaagcctccacttaacagaaattcagttttcacgtgttttcagataagtaaggatactaaaattcaattaggtgaatttgtgtttgagcaatctgagtacggtagtgattctgtttattacaagagcacgagtacttacaaattgacaccaggtatgatttttgtgttgacttctcataatgtgagtcctcttaaagctccaattttagtcaaccaagaaaagtacaataccatatctaagctctatcctgtctttaatatagcggaggcctataatacactggttccttactaccaaatgataggtaagcaaaaatttacaactatccaaggtcctcctggtagcggtaaatctcattgtgttataggtttgggtttgtattaccctcaggcgagaatagtctacactgcatgttctcatgcggctgtagacgctttatgtgaaaaagcagccaaaaacttcaatgttgatagatgttcaaggataatacctcaaagaatcagagttgattgttacacaggctttaagcctaataacaccaatgcgcagtacttgttttgtactgttaatgctctaccagaagcaagttgtgacattgttgtagttgatgaggtctctatgtgtactaattatgatcttagtgtcataaatagccgactgagttacaaacatattgtttatgttggagacccacagcagctaccagctcctagaactttgattaataagggtgtacttcaaccgcaggattacaatgttgtaaccaaaagaatgtgcacactaggacctgatgtctttttgcataaatgttacaggtgcccagctgaaattgttaaaacagtctctgcacttgtttatgaaaataaatttgtacctgtcaacccagaatcaaagcagtgcttcaaaatgtttgtaaaaggtcagattcagattgagtctaactcttctataaacaacaagcaactagaggttgtcaaggcctttttagcacataatccaaaatggcgtaaagctgttttcatctcaccctataatagtcaaaattatgttgctcggcgtcttcttggtttgcaaacgcaaactgtggattccgctcagggtagtgagtatgattacgtcatctagctgctctgaagatttttaatcctgctgcaattcacgatgtgggtaatccaaaaggcatccgttgtgctacaacaccaataccatggttttgttatgatcgtgatcctattaataacaatgttagatgtctggattatgactatatggtacatggtcaaatgaatggtcttatgttattttggaactgtaatgtagacatgtacccagagttttcaattgtttgtagatttgatactcgcactcgctctaaattgtctttagaaggttgtaatggtggtgcattgtatgttaataaccatgctttccacacaccagcttatgatagaagagcttttgctaagcttaaacctatgccattcttttactatgatgatagtaattgtgaacttgttgatgggcaacctaattatgtaccacttaagtcaaatgtttgcataacaaaatgcaacattggtggtgctgtctgcaagaagcatgctgctctttacagagcgtatgttgaggattacaacatttttatgcaggctggttttacaatatggtgtcctcaaaactttgacacctatatgctttggcatggttttgttaatagcaaagcacttcagagtctagaaaatgtggcttttaatgtcgttaagaaaggtgccttcaccggtttaaaaggtgacttaccaactgctgttattgctgacaaaataatggtaagagatggacctactgacaaatgtatttttacaaataagactagtttacctacaaatgtagcttttgagttatatgcaaaacgcaaacttggactcacacctccattaacaatacttaggaatttaggtgttgtcgcaacatataagtttgtgttgtgggattatgaagctgaacgtcctttctcaaatttcactaagcaagtgtgttcctacactgatcttgatagtgaagttgtaacatgttttgataatagtattgctggctcttttgagcgttttactactacaagagatgcagtgcttatttctaataacgctgtgaaagggcttagtgccattaaattacaatatggccttttgaatgatctacctgtaagtactgttggaaataaacctgtcacatggtatatctatgtgcgcaagaatggtgagtacgtcgaacaaatcgatagttactatacacagggacgtacttttgaaaccttcaaacctcgtagtacaatggaagaagattttcttagtatggatactacactcttcatccaaaagtatggtcttgaggattatggttttgaacacgttgtatttggagatgtctctaaaactaccattggtggtatgcatcttcttatatcgcaagtgcgccttgcaaaaatgggtttgttttccgttcaagaatttatgaataattctgacagtacactgaaaagttgttgtattacatatgctgatgatccatcttctaagaatgtgtgcacttatatggacatactcttggacgattttgtgactatcattaagagcttagatcttaatgttgtgtccaaagttgtggatgtcattgtagattgtaaggcatggagatggatgttgtggtgtgagaattcacatattaaaaccttctatccacaactccaatctgctgaatggaatcccggctatagcatgcctacactgtacaaaatccagcgtatgtgtctcgaacggtgtaatctctacaattatggtgcacaagtgaaattacctgatggcattactactaatgtcgttaagtatactcagttgtgtcaataccttaacactactacattgtgtgtaccacacaaaatgcgtgtattgcatttaggagctgctggtgcatctggtgttgctcctggtagtactgtattaagaagatggttaccagatgatgccatattggttgataatgatttgagagattacgtttccgacgcagacttcagtgttacaggtgattgtactagtctttacatcgaagacaagtttgatttgctcgtctctgatttatatgatggctccacaaaatcaattgacggtgaaaacacgtcgaaagatggtttctttacttatattaatggtttcattaaagagaaactgtcacttggtggatctgttgccattaaaatcacggaatttagttggaataaagatttatatgaattgattcaaagatttgagtattggactgtgttttgtacaagtgttaacacgtcatcatcagaaggctttctgattggtattaactacttaggaccatactgtgacaaagcaatagtagatggaaatataatgcatgccaattatatattttggagaaactctacaattatggctctatcacataactcagtcctagacactcctaaattcaagtgtcgttgtaacaacgcacttattgttaatttaaaagaaaaagaattgaatgaaatggtcattggattactaaggaagggtaagttgctcattagaaataatggtaagttactaaactttggtaaccacttcgttaacacaccatgaaaaaatgctgtatttattacagttttaatcttactactaattggtagactccaattattagaaagactattacttaatcactctttcaatcttaaaactgtcaatgactttaatatcttatataggagtttagcagaaaccagattactaaaagtggtgcttcgagtaatctttctagtcttactaggattttgctgctacagattgttagtcacattaatgtaaggcaacccgatgtctaaaactggtttttccgaggaattactggtcatcgcgctgtctactcttgtacagaatggtaagcacgtgtaataggaggtacaagcaaccctattgcatattaggaagtttagatttgatttggcaatgctagatttagtaatttagagaagtttaaagatccgctacgacgagccaacaatggaagagctaacgtctggatctagtgattgtttaaaatgtaaaattgtttgaaaattttccttttgatagtgatacaaaaaa

SEQ ID NO: 93 - DNA, 922 bp, Coronavirus
tttgaacaaatttggtaaagctagactttactacgaaactctttcatatgaagagcaggatgcactttttgctttaacaaagagaaatgttttacccacaatgactcaaatgaatttgaaatacgctatttctggtaaggcaagagctcgtacagtaggaggagtttcacttctttctaccatgactacgagacaatatcatcagaagcatttgaagtcaattgctgcaacacgcaatgctactgtggtcattggttcaaccaagttttatggtggttgggacaatatgcttaaaaatttaatgcgtgatgttgataatggttgtttgatgggatgggactatcctaagtgtgaccgtgctttacctaatatgattagaatggcttctgccatgatattaggttctaagcatgttggttgttgtacacataatgataggttctaccgcctctccaatgagttagctcaagtactcacagaagttgtgcattgcacaggtggtttttattttaaacctggtggtacaactagcggtgatggtactacagcatatgctaactctgcttttaacatctttcaagctgtttctgctaatgttaataagcttttgggggttgattcaaacgcttgtaacaacgttacagtaaaatccatacaacgtaaaatttacgataattgttatcgtagtagcagcattgatgaagaatttgttgttgagtactttagttatttgagaaaacacttttctatgatgattttatctgatgatggagttgtgtgctacaacaaagattatgcggatttaggttatgtagctgacattaatgcttttaaagcaacactttattaccagaataacgtctttatgtccacttctaagtgttgggtagaaccagatcttagtgttggaccacatgaattt

SEQ ID NO: 94 - DNA, 919 bp, Coronavirus
atttaataagtttggaaaggcccgtctctattatgaaatgagtctagaagaacaggatcaactctttgagagtacaaagaagaatgtcctgcctactataactcaaatgaatttaaaatatgccatatccgcgaaaaatagagcgcgtacagtggcaggtgtgtctatcctttccactatgactaataggcaatttcatcagaagattcttaagtctatagtcaatactagaaatgctcctgtagttattgggacaaccaagttttatggcggttgggacaatatgttgaggaacctgattcaaggtgttgaagaccctattcttatggggtgggattatcctaagtgtgatagagcaatgccaaatttgctacgtataacagcatctttggtacttgctcgcaaacacactaattgttgtacttggtctgaacgcatttataggttgtataatgaatgcgctcaggttttatctgaaactgttttagctacaggtggtatttatgtaaaacctggtggcactagcagtggtgatgctactacagcttatgcaaacagtgtctttaatataatacaagccacatctgctaatgttgcgcgtcttttgagtgttataacgcgtgatattgtttatgatgacattaagagcttgcagtatgaattgtaccagcaggtttacaggcgagtcaatttcgacccagcctttgtagaaaagttttattcttacttatgtaagaatttctcattgatgatctttgctgacgacggtgttgtttgttataacaatacactagccaaacaaggtcttgtagcagacatttctggttttagagaaattctctactaccaaaataatgtttatatggctgattctaagtgttgggttgagcccgacttagaaaaaggtccacatgaattt

SEQ ID NO: 95 - DNA, 524 bp, Coronavirus
tgattgttttgtcaaacgtgttgattggtctattgtgtacccttttattgacaatgaggaaaagatcaataaagctggtcgcattgtgcaatcacatgtcatgaaagctgctctgaaaatttttaaccctgctgcaattcacgatgtgggcaatcccaaaggcatccgttgtgctacaacacctataccatggttctgttatgacagagatcctattaataacaatgttagatgtctggagtatgactatatggtacatggtcaaatgaatggtcttatgttattttggaactgcaatgtagacatgtacccagagttctcaattgtttgtagatttgatactcgcacgcgctctaaattgtctttagaaggttgtaatggtggtgcattgtatgttaataaccatgctttccacacaccagcttatgatagaagagcttttgctaagcttaaacctatgccattcttttactatgatgatagtaattgtgaacttgttgatggacaacctaattatgtgccac

SEQ ID NO: 96 - DNA, 524 bp, Coronavirus
tgactgttttgtcaaacgtgttgattggtcaattgtgtacccttttattgacaacgaagaaaagatcaataaagctggtcgcatagtacagtcacatgtcatgaaagctgctctgaaaatttttaatcctgctgcaattcacgatgtgggtaatcccaaaggcatccgttgtgctacaacaccaataccatggttttgttatgaccgtgatcctattaataacaatgttagatgtctggagtatgactatatggtacatggtcaaatgaatggtcttatgttgttttggaactgtaatgtggacatgtacccagagttctcaattgtttgtaggtttgatactcgaactcgctctaaattatctttagaaggttgtaatggtggtgcattgtatgtaaacaatcatgctttccacacaccagcttatgatagaagagcatttgctaagcttaaaccaatgccattcttctactatgatgatagtagttgtgaacttgttgatgggcaattaaactatgtaccac

SEQ ID NO: 97 - DNA, 524 bp, Coronavirus
tgattgttttgtcaaacgtgttgattggtcaattgtgtacccttttattgacaatgaagaaaagatcaataaagctggtcgcatagtgcagtcacatgtcatgaaagctgctctgaagatttttaatcctgctgcaattcacgatgtgggtaatcctaaaggaatccgttgtgctacaacacctataccatggttctgttatgaccgagatcctattaataacaatgttagatgtctggagtatgattacatggtacatggtcaaatgaatggtttaatgttgttttggaactgtaatgtagacatgtacccagagttctcaattgtttgtaggtttgatactcgcactcgatctaaattgtctttagaaggttgtaatggtggtgcattgtatgtcaataaccatgctttccacacaccagcttatgatagaagagcttttgctaagcttaaacctatgccattcttttactatgatgatagtaattgtgaacttgttgatggacaacctaattatgtaccac

SEQ ID NO: 98 - DNA, 524 bp, Coronavirus
tgattgttttgtcaaacgtgttgactggtcaattgtgtacccttttattgacaacgaagaaaagatcaataaagctggtcgcatagttcagtcacatgtcatgaaagctgctttgaagatttttaatcctgctgcaattcatgatgtgggtaatcccaaaggcatccgttgtgctacaacaccaataccatggttttgttatgatcgtgatcctattaataacaatgttagatgtctggagtatgactatatggtacatggtcaaatgaatggtcttatgttattttggaactgcaatgtagacatgtacccagagttttcaattgtttgtagatttgatactcgcactcgctctaaactgtctttagaaggttgtaatggtggtgcattgtatgtaaataaccatgctttccacacaccagcttatgatagaagagcttttgctaagcttaaacctatgccattcttttactatgatgatagtaattgtgaacttgttgatggacaacctaattatgtaccac

SEQ ID NO: 99 - DNA, 539 bp, Coronavirus
tgattgcttttgcaataatattaattggaatgtggagtatcccatcatttcaaatgagttaagtattaatacctcttgtagggtcttgcagcgtgtgattcttaaagctgccatgctctgcaacagatatactttgtgttatgatattggcaacccaaaagcgattgcctgtgtcaaagattttgattttaagttctatgatgcccaaccaattgttaagtctgttaagactcttttgtattcttttgaggcacataaggactcttttaaagacggtttgtgtatgttttggaactgtaatgtggataagtatccaccgaatgcagttgtatgtagatttgacactagagtgttgaataatttaaatcttcctggctgtaatggaggtagtttgtatgttaataaacatgcattccacactaaaccctttgctagggcagcctttgagcatttgaagcctatgccattcttctattattcagatacgccttgtgtgtatatggatggcatggatgctaagcaggttgattatgtacctt

SEQ ID NO: 100 - DNA, 539 bp, Coronavirus
tgattgcttttgtaagtctgttaattggaatttagaataccccattatttcaaatgaggtcagtgttaatacctcctgcaggttattgcagcgcgtaatgtttagggctgcgatgctatgcaacaggtatgatgtgtgttatgacattggcaaccctaaaggtcttgcctgtgtcaaaggttatgattttaagttttatgatgcctctcctgttgttaagtctgttaagcagtttgtttataaatacgaggcacataaagatcaatttttagatggtttatgtatgttttggaactgcaatgtggataagtatccagcgaatgcagttgtgtgtaggttcgacacgagagtgttaaacaaattaaatctccctggctgtaatggtggtagtctgtatgttaataaacatgcattccacaccagtccctttacgcgggcagccttcgagaatttaaagcctatgcctttcttttattattcagatacgccttgtgtgtatatggaaggcatggagtctaagcaggtcgattatgtcccat

SEQ ID NO: 101 - DNA, 539 bp, Coronavirus
tgattgcttttgtaaatctgtcaattggaatttagaataccccattattttaaatgaggtcagtgttaatacctcctgtaggttattgcagcgcgtaatgtttagggctgcgatgctatgcaataggtatgatgtgtgttatgacattggcaaccctaagggtcttgcctgtgtcaaaggatatgattttaagttttatgatgcctcccctgttgttaagtctgttaaacagtttgtttataagtacgaggcacataaagatcaatttttagatggtctatgtatgttctggaactgcaatgtggataagtatcccgcgaatgcagttgtgtgtaggtttgacacgcgcgtgttaaacaaattaaatctccctggctgtaatggtggtagtctgtatgttaacaaacatgcattccacactagcccttttacccgggctgcattcgagaatttgaagcctatgcctttcttctattattcagatacaccttgtgtgtatatggaaggcatggaatctaagcaggtagattatgtcccat

SEQ ID NO: 102 - DNA, 83 bp, Artificial Sequence
  PCR Internal Calibrant Standard Sequence
caagttttacggtggctggcataatatgttaaatttacagtgatgtagaaactccacaccttatgggttgggattatccaaaa

SEQ ID NO: 103 - DNA, 132 bp, Artificial Sequence
  PCR Internal Calibrant Standard Sequence
tgtttgttttggaattgtaacgttgatcgttacccagccaatgcaattgtgtgtaggttcaagagtcttgtcaaacttgaacttaccaggctgtgatggtggtagtttgtatgtgaataagcatgcattcca

SEQ ID NO: 104 - DNA, 265 bp, Artificial Sequence
  PCR Internal Calibrant Standard Sequence
tggaacaagcaagttttacggtggctggcataatatgttaaatttacagtgatgtagaaactccacaccttatgggttgggattatccaaaatgtgacagaggataaattcactgatggtgtttgtttgttttggaattgtaacgttgatcgttacccagccaatgcaattgtgtgtaggttcaagagtcttgtcaaacttgaacttaccaggctgtgatggtggtagtttgtatgtgaataagcatgcattccacactccagct

SEQ ID NO: 105 - DNA, 12 bp, Artificial Sequence
  Internal Mass Standard
cgtgcatggcgg
